(19) United States
(12) Patent Application Publication
(10) Pub. No.: US 2024/0190987 A1
(43) Pub. Date: Jun. 13, 2024

(54) Engineered EpCam Binding Antibodies

(71) Applicant: TigaTX, Boston, MA (US)

(72) Inventors: Zachary B. HILL, San Mateo, CA (US); Alexander J. MARTINKO, San Francisco, CA (US); Allison COOKE, San Francisco, CA (US); Hai TRAN, San Francisco, CA (US); Erin SIMONDS, San Francisco, CA (US); Sunandan BANERJEE, Newton Centre, MA (US)

(21) Appl. No.: 18/349,562

(22) Filed: Jul. 10, 2023

Related U.S. Application Data
(63) Continuation of application No. PCT/US2022/012056, filed on Jan. 11, 2022.
(60) Provisional application No. 63/136,111, filed on Jan. 11, 2021.

(51) Int. Cl. C07K 16/30; A61P 35/00; C07K 16/28; C07K 16/32

(52) U.S. Cl. CPC C07K 16/30; A61P 35/00; C07K 16/2803; C07K 16/32; C07K 2317/24; C07K 2317/31; C07K 2317/622

(57) ABSTRACT

The present invention uses an indinavir based mechanism of “chemically induced dimerization” to enable a precise temporal control of the activity of a T cell engaging complex in a patient.

### CROSS REFERENCE TO RELATED APPLICATIONS

[0001] This application is a continuation of International Application No. PCT/US2022/12056, filed on Jan. 11, 2022, which claims priority to U.S. Provisional Application No. 63/136,111, filed on Jan. 11, 2021, all of which are herein incorporated by reference in their entirety.

### SEQUENCE LISTING

[0002] The instant application contains a Sequence Listing which has been submitted electronically in ST.26 format and is hereby incorporated by reference in its entirety. Said copy, created on Nov. 6, 2023, is named 199828-713301 SL.xml and is 5,283,660 bytes in size.

### I. BACKGROUND OF THE INVENTION

[0003] T cell engagers are antibody derived therapeutics that transiently tether T cells via the T cell receptor complex (TCR) to surface antigens on tumor cells. This may lead to activation of T cells and direction of T cell induced lysis of the attached target tumor cells. The therapeutic potential of a T cell engager was demonstrated for example by blinatumomab, a CD19/CD3-bispecific T cell engager approved for the treatment of adult patients with relapsed/refractory acute lymphoblastic leukemia.

[0004] One of the shortcomings of the first generation of T cell engagers was a very short serum half-life. To address this, a second generation of T cell engagers was developed in which the T cell engager was fused to a human serum albumin (HSA) or Fc domain (Merlot et al., Future Med Chem. 2015; 7:553-556; Kontermann et al., Chem Biotechnol. Pharm Biotechnol. 2011; 22:868-876). However, increased serum stability has been accompanied by increased toxicity, including acute cytokine release syndrome, neurotoxicities, and/or toxicities due to engagement of the target antigen in other tissues. In some instances, such toxicities have prevented therapeutic dosing of the drugs to patients, limiting their efficacy. The toxicities are of particular concern for half-life extended T-cell engagers that may exist in a patient for weeks.

[0005] The present invention meets the need of developing more advanced therapies by providing a system that enables precise temporal control of the association of T cells with target cells, and in doing so enabling safer and more efficacious dosing of the biologics to patients.

### II. BRIEF SUMMARY OF THE INVENTION

[0006] In one aspect, the present disclosure relates to a composition comprising an indinavir binding domain comprising a) a variable heavy (VH) domain comprising a vhCDR1, vhCDR2, and vhCDR3 sequence; and b) an optional variable light (VL) domain comprising a vlCDR1, vlCDR2, and vlCDR3 sequence.

[0007] In one aspect, the present disclosure relates to a composition comprising an indinavir-complex binding domain comprising a) a variable heavy (VH) domain comprising a vhCDR1, vhCDR2, and vhCDR3 sequence; and b) a variable light (VL) domain comprising a vlCDR1, vlCDR2, and vlCDR3 sequence.

[0008] In one aspect, the present disclosure relates to a composition comprising a) a first protein comprising the composition comprising the indinavir binding domain described herein, and b) a second protein comprising the composition comprising the indinavir-complex binding domain described herein.

[0009] In one aspect, the present disclosure relates to a composition comprising a CD3 binding domain comprising a) a variable heavy (VH) domain comprising a vhCDR1, vhCDR2, and vhCDR3 sequence; and b) a variable light (VL) domain comprising a vlCDR1, vlCDR2, and vlCDR3 sequence.

[0010] In one aspect, the present disclosure related to a composition comprising a CC heterodimeric binding protein comprising: i) a first CC fusion protein comprising: 1) a first indinavir chemically induced dimerization (iCID) domain; 2) an optional domain linker, and 3) a first heterodimerization Fc domain; and ii) a second CC fusion protein comprising: 1) an anti-CD3 antigen binding domain (ABD; αCD3-ABD); 2) an optional domain linker; and 3) a second heterodimerization Fc domain. In another aspect, the present disclosure related to a composition comprising a monomeric CC binding protein comprising: a) a first indinavir chemically induced dimerization (iCID) domain; b) an optional domain linker; c) an IgG4 monomeric Fc domain; d) an optional domain linker; and e) an anti-CD3 antigen binding domain (ABD; αCD3-ABD). In another aspect, a composition comprising a CC heterodimeric binding protein comprising: a) a first CC fusion protein comprising: 1) a first indinavir chemically induced dimerization (iCID) domain; 2) an optional domain linker; 3) an αCD3-ABD; and 4) a first heterodimerization Fc domain; and ii) a second CC fusion protein comprising: a second heterodimerization Fc domain.

[0011] In one aspect, the present disclosure relates to a composition comprising a EpCAM binding domain comprising a) a variable heavy (VH) domain comprising a vhCDR1, vhCDR2, and vhCDR3 sequence; and b) a variable light (VL) domain comprising a vlCDR1, vlCDR2, and vlCDR3 sequence.

[0012] In one aspect, the present disclosure relates to a composition comprising an CT heterodimeric binding protein comprising: a) a first CT fusion protein comprising: 1) a second iCID domain; 2) an optional domain linker, and 3) a first heterodimerization Fc domain; and b) a second CT fusion protein comprising: 1) a first anti-tumor targeting ABD (αTTABD); 2) an optional domain linker, and 3) a second heterodimerization Fc domain. In another aspect, the present disclosure relates to a composition comprising a monomeric CT binding polypeptide comprising: a) a second indinavir chemically induced dimerization (iCID) domain; b) an optional domain linker(s); c) an IgG4 monomeric Fc domain; and d) an anti-tumor targeting ABD (αTTABD).

[0013] In one aspect, the present disclosure relates to a T-cell ligand induced transient engager (T-LITE) composition comprising: a) the CC binding protein described herein, and b) the CT binding protein described herein, wherein in the presence of indinavir said first and second iCID domains form a complex of said first iCID domain-indinavir-said second iCID domain, such that said T-LITE composition will bind both CD3 and said tumor.

[0014] In one aspect, the present disclosure relates to a composition comprising a CTCoS heterodimeric binding protein comprising: a) a first CTCoS fusion protein comprising: i) a second iCID domain; ii) optional domain linker(s); and iii) a first heterodimerization Fc domain; and b) a second CTCoS fusion protein comprising: i) an anti-tumor targeting antigen binding domain (αTTABD); ii) optional domain linker(s); and iii) a second heterodimerization Fc domain; wherein one of said first and second CTCoS fusion proteins further comprises a co-stimulatory domain.

[0015] In one aspect, the present disclosure relates to a co-stimulatory T-cell ligand induced transient engager (BrighT-LITE) composition comprising: a) the CC binding protein comprising the first iCID domain described herein; and b) the CTCoS binding protein comprising the second iCID domain described herein; wherein one of said first iCID domain and said second iCID domain comprises an indinavir binding domain and the other comprises an indinavir-complex binding domain, wherein in the presence of indinavir said first and second iCID domains form a complex of said first iCID domain-indinavir-said second iCID domain, such that said T-LITE composition will bind both CD3 and said tumor.

[0016] In one aspect, the present disclosure relates to a composition comprising a CTTCoS heterodimeric binding protein comprising: a) a first CTTCoS fusion protein comprising: i) a second iCID domain; ii) optional domain linker(s); iii) a first anti-tumor targeting antigen binding domain (αTTABD); iv) a first heterodimerization Fc domain; and b) a second CTTCoS fusion protein comprising: i) a T-cell co-stimulatory receptor binding domain (CoS); ii) optional domain linker(s); iii) a second αTTABD; and iv) a second heterodimerization Fc domain.

[0017] In one aspect, the present disclosure relates to a co-stimulatory dual targeting T-cell ligand induced transient engager (dual BrighT-LITE) composition comprising: a) the CC binding protein comprising the first iCID domain described herein; and b) a CTTCoS binding protein comprising the second iCID domain described herein; wherein one of said first iCID domain and said second iCID domain comprises an indinavir binding domain and the other comprises an indinavir-complex binding domain, wherein in the presence of indinavir said first and second iCID domains form a complex of said first iCID domain-indinavir-said second iCID domain, such that said T-LITE composition will bind both CD3 and said tumor.

[0018] In one aspect, the present disclosure relates to a method of treating cancer in a subject, comprising administering the composition described herein. In one aspect, the present disclosure relates to a kit comprising the composition described herein. In one aspect, the present disclosure relates to use of the composition described herein for treating cancer.

### III. BRIEF DESCRIPTION OF THE DRAWINGS

[0019] FIG. 1A illustrate a general mechanism of action of some embodiments of the invention (e.g. those that use Fc heterodimers). FIGS. 1A-1D illustrate a general T-LITE™ (“Format 1”), FIG. 2 illustrates a general brighT-LITE™ (“Format 2”), and FIGS. 3A and 3B illustrate a general “dual targeting brighT-LITE™ (“Format 3”) mechanisms of action of some embodiments of the invention (e.g. those that use Fc heterodimers). The small molecule brings together two “chemically induced dimerization” or “CID” domains and thus brings together the anti-CD3 (αCD3) antigen binding domain (ABD) and the anti-tumor target antigen (αTTA) binding domain (αTTABD), forming a final active complex and allowing for T cell engagement and tumor killing. FIGS. 1B and 1C depict exemplary final active complexes each comprising three different components: a “CT heterodimer” that has a CID domain and binds to the Tumor target antigen (and is thus a “CT” construct); a CID small molecule, that drives the formation of the complex, and a “CC heterodimer” that has a CID domain and binds to CD3, such that in the presence of the small molecule, the complex is formed and has T cell engaging activity. The Fc domains are shown as heterodimers as well. FIG. 1D depicts an example where the CC heterodimer has two tandem CID domains on one polypeptide.

[0020] FIG. 2 depicts an exemplary final active complex comprising three different components: a “CC heterodimer” that has a CID domain and a CD3 antigen binding domain (thus referred to herein as a “CC” binding protein); a “CTCoS heterodimer” that has a CID domain, a Targeting domain binding to a tumor target antigen and a Co-Stimulatory domain (CoS) (thus referred to herein as a “CTCoS” binding protein); and a CID small molecule that drives the formation of the complex.

[0021] FIG. 3 depicts an exemplary final active complex comprising three different components: a “CC heterodimer”; a “CTT heterodimer” that has a CID domain, two Targeting domains binding to two tumor targeting antigens (αTTABD) and a Co-Stimulatory domain (CoS) (thus referred to herein as a “CTTCoS” binding protein); and a CID small molecule that drives the formation of the complex. In the presence of the small molecule, the complex is formed and has T cell engaging activity. In the presence of the small molecule, the complex is formed and has T cell engaging activity. Those of skill in the art will recognize that the “αTTABD”, “αCD3,” “αCD3-ABD,” “αCD28/4-1BB,” “CoS” and “CID” domains, depicted graphically as shapes in Figures, can take on a number of different forms, including a Fab, an scFv or an scFab as disclosed herein and as known in the art.

[0022] FIG. 4 illustrates the structure of indinavir.

[0023] FIGS. 5A-5E show sequences for exemplary LS2A iCID domains that bind to indinavir. FIG. 5F shows sequences for exemplary LS2B antigens that bind to LS2A iCID domains.

[0024] FIGS. 6A-6G show sequences for exemplary LS2B iCID domains that bind to indinavir-complex. FIG. 6H shows sequences for exemplary LS2A antigens that bind to LS2B iCID domains.

[0025] FIGS. 7A-7C and 7E show exemplary sequences for αCD3 ABDs. FIG. 7D depicts exemplary CD3 antigen sequences used in Examples. In FIG. 7E, CDR sequences from the VH and VL are underlined, the linker sequences are shown in italics, and, if applicable, the junctions between domains (e.g. between the VH and VL domains and the scFv linkers in scFv formats or between the VH and CH1 or VL and CL in full length formats) are shown with slashes (“/”). As will be appreciated by those in the art and outlined herein, when scFv domains are used to bind to CD3, they can be in either orientation, VH-scFv linker-VL or VL-scFv liner-VH. As will be appreciated by those in the art, any of the variable heavy and variable light domains of the full length heavy and light chains can be used to form scFvs with an scFv linker.

[0026] FIGS. 8A-8C show exemplary sequences for αTTABDs.

[0027] FIGS. 9A-9F show exemplary sequences for CC, CT and conventional T-Cell engaging antibodies (TCE) heterodimers. The conventional TCE do not have the indinavir binding domain or the indinavir-complex binding domain.

[0028] FIG. 10 shows amino acid sequences of exemplary IgG Fc variants that find use in the present invention.

[0029] FIG. 11 shows the amino acid sequences of exemplary co-stimulatory domains. As outlined herein, the VH and VL domains can be used in different formats, including Fab, scFab and scFv constructs.

[0030] FIGS. 12A-12G illustrate different formats of CC heterodimeric binding proteins, all of which contains a first Fc fusion comprising a CID domain and a first heterodimerization Fc domain, and a second Fc fusion protein comprising an αCD3-ABD and a second heterodimerization Fc domain. FIG. 12A shows exemplary formats wherein the CID domain (e.g., BCL-2, although BCL-2 can be replaced by other CID domains, including, but not limited to, cereblon LBD, CIAP and iCID domains, with many embodiments utilizing iCID domains) is linked to the first heterodimerization Fc domain optionally via a domain linker, and the αCD3-ABD is in an scFv format and linked to the second heterodimerization Fc domain optionally via a domain linker. That is, in FIG. 12, BCL-2 can be replaced with an iCID domain.

[0031] FIG. 12B shows another exemplary format wherein the CID domain (e.g., AZ21, methotrexate ABD, both of which can be replaced by an iCID) in the format of an Fab is linked to the first heterodimerization Fc domain optionally via a domain linker, and the αCD3-ABD in an scFv format is linked to a second heterodimerization Fc domain optionally via a linker domain. FIG. 12C shows a third exemplary format wherein the CID is in the format of single chain Fab (e.g., AZ21, which can be replaced by an iCID) and linked to the first heterodimerization Fc domain optionally via a domain linker, and the αCD3-ABD is in an scFv format and linked to the second heterodimerization Fc domain optionally via a domain linker.

[0032] FIG. 12D shows further exemplary formats wherein the CID domain (again, as above, the Figures utilize BCL-2 but this domain can be replaced by an iCID domain is linked to the first heterodimerization Fc domain optionally via a domain linker on the C terminus and the αCD3-ABD in an scFv format is linked to the second heterodimerization Fc domain optionally via a linker domain on the N terminus; or the CID again, an iCID domain in many embodiments) is linked to the first heterodimerization Fc domain optionally via a domain linker on the N terminus and the αCD3-ABD in an scFv format is linked to the second heterodimerization Fc domain optionally via a linker domain on the C terminus. In all the formats, 6×His and/or FLAG epitope tags can be included in the Fc domain to facilitate purification. FIG. 12E illustrates exemplary formats of a CC heterodimeric binding protein containing an Fc fusion comprising a CID domain (e.g., an iCID domain), an αCD3-ABD and a first heterodimerization Fc domain, and an empty heterodimerization Fc domain. From the N to C terminus, the Fc fusion protein can be in the format of CID-optional domain linker-αCD3-ABD-optional domain linker-Fc, or αCD3-ABD-optional domain linker-CID-optional domain linker-Fc. The CID domain and αCD3-ABD can take various formats, for example, an scFv format. As above, Bcl-2 as labeled in these figures can be interchanged with any iCID domain as disclosed herein. FIG. 12E shows exemplary formats wherein the CID domain (e.g., iCID domains, LSA or LSB) is linked to the first heterodimerization Fc domain optionally via a domain linker, and the αCD3-ABD is in an scFv format and linked to the second heterodimerization Fc domain optionally via a domain linker. That is, in FIG. 12E, LS2A and LS2B are iCID domain. FIG. 12F shows exemplary formats wherein the CID domain (e.g., iCID domains, LSA or LSB) is linked to a second CID domain (e.g., iCID domains, LSA or LSB) via a domain linker which is then linked to the first heterodimerization Fc domain optionally via a domain linker, and the αCD3-ABD is in an scFv format and linked to the second heterodimerization Fc domain optionally via a domain linker. That is, in FIG. 12F, LS2A and LS2B are iCID domain.

[0033] FIGS. 13A-13C illustrate exemplary formats of CC heterodimeric binding proteins, each of which is composed of a first CC fusion polypeptide and second CC fusion polypeptide.

[0034] FIG. 14A-C illustrates exemplary formats of CT heterodimeric binding proteins, each of which is composed of a first CT fusion polypeptide and second CT fusion polypeptide. The CID domain, such as AZ21 and BCL-2, can be replaced by other CID domains described herein (e.g., iCID domains).

[0035] FIG. 14B depicts exemplary iCIDs of CT proteins, such as LS2A and LS2B, with monovalent engagement of EpCAM. FIG. 14C depicts exemplary iCIDs of CT proteins with bivalent engagement of EpCAM. FIGS. 14D and 14E depict additional exemplary formats a CT heterodimeric binding protein composed of a first CT fusion polypeptide and second CT fusion polypeptide.

[0036] FIG. 15 depicts the SEC-HPLC retention profiles and binding profiles to LS2A (with and without 10 μM Indinavir) measured by biolayer interferometry (BLI) for select indinavir-complex binding domains (LSBs). For SEC-HPLC data, 1.5-10 μL of 1-5 μM sample was injected onto a MabPAC 4.6×150 mm in 1×PBS-HCl at pH 7.0. BLI was performed by interrogating binding of each indinavir-complex binding domain (LSBs) to biotinylated-Ab0223 immobilized on a streptavidin biosensor. While Ab0309, Ab0310, and Ab0311 showed selective binding to Indinavir-complex, late retention times suggested non-specific column interactions. This motivated further optimization of Ab0310 to address this property.

[0037] FIG. 16 depicts improved SEC-HPLC retention profiles in LS2B after multiple rounds of engineering. For each molecule, 1.5-10 μL of 1-5 μM sample was injected onto a MabPAC 4.6×150 mm in 1×PBS-HCl at pH 7.0. Improved variants including LS2B-R5M2 and LS2B-R5M1 showed monodisperse peaks and retention times more similar to the Herceptin control, suggesting that engineering successfully mitigated non-specific column interactions.

[0038] FIG. 17 demonstrates the improvement of binding affinity of select LS2A and LS2B pairs. Binding kinetics were measured by biolayer interferometry (BLI). Biotinylated-Ab0785 (LS2A R2M34 Fab) or biotinylated-Ab0786 (LS2A R3M1 Fab) was captured by streptavidin biosensors and binding to Ab1071 (LS2B R5M2 Fab), Ab1072 (LS2B R7M1 Fab), and Ab1073 (LS2B R7M2 Fab) was measured in the presence of 10 mM indinavir. Ab1071 (LS2B R5M2 Fab) showed weaker binding to LS2A R3M1 compared to LS2A R2M34. Engineered LS2B clones R7M1 and R7M2 demonstrate improved affinities to both LS2A clones.

[0039] FIG. 18 demonstrates the improvement in acid-stability of engineered humanized LS2A antibodies. Molecules tested include Ab0188 (murine LS2A), Ab0220 (humanized LS2A), Ab0734 (humanized LS2A R2M9), and Ab0759 (humanized LS2A R2M34). The pH of the antibodies was adjusted to 3.5 and held for 1 hour at room temperature. Acid-treated and untreated samples were analyzed by size exclusion chromatography. Ab0734 and Ab0759 demonstrated improved acid-stability.

[0040] FIG. 19 demonstrates the improvement in thermostability of engineered humanized LS2A antibodies. Molecules tested include Ab0188 (murine LS2A), Ab0220 (humanized LS2A), Ab0898 (humanized LS2A R2M34), and Ab0899 (humanized LS2A R3M1). The scFv melting temperature was determined by differential scanning fluorimetry (DSF).

[0041] FIG. 20 shows the binding kinetics of free indinavir binding to LS2A R2M34 and LS2A R3M1 measured by surface plasmon resonance (SPR). Detailed methods are described in the methods section. Briefly, Ab0759 (LS2A R2M34) and Ab0899 (LS2A R3M1) were amine coupled to a CM5 sensor chip. A 3-fold serial dilution of indinavir was injected over sensor chip and binding was measured using single-cycle kinetics. The data was double reference subtracted and fit to a 1:1 Langmuir kinetic model.

[0042] FIG. 21 demonstrates LITE Switch reversibility upon indinivir (IDV) washout. Binding was measured by biolayer interferometry (BLI). Biotinylated-Ag0067 (LS2A R2M9) was captured on streptavidin biosensors. Binding of 50 nM Ab1073 (LS2B R7M2) to Ag0067 was allowed to reach steady-state in the presence of 1 μM IDV. Complex dissociation was subsequently performed for 2 hours in buffer containing (1) 50 nM Ab1073 and 1 μM IDV, (2) 50 nM Ab1073 and vehicle (washout), and (3) vehicle only. Data show that when concentrations of Ab1073 and IDV remained constant, no LITE Switch reversibility was observed. In 2 hours of IDV washout, the LITE Switch dissociated to nearly 0% complex, whereas complete complex dissociation was observed within 10 min upon removal of both Ab1073 and IDV.

[0043] FIG. 22 demonstrates that the LITE Switch assembles as a heterodimer in the presence of Indinavir. SEC complex assembly with Indinavir. Briefly, Ab0220, Ab0445, or Ab0220+Ab0445 was injected onto a MabPAC 4.6×150 mm in 1×PBS-HCl+/−10 μM Indinavir at pH 7.0. When injected individually, Ab0220 and Ab0445 each show retention times consistent with a monomer. When injected together in the presence of Indinavir, Ab0220+Ab0445 elute as a complex consistent with the molecular weight of a heterodimer.

[0044] FIG. 23 demonstrates the indinavir-dependent binding of LS2A and LS2B. Binding was measured by biolayer interferometry (BLI). Ab0902 (LS2B R5M2) was captured by anti-hIgG Fc capture (AHC) biosensors and kinetics was measured to Ab0223 (LS2A humanized parent) in the presence of 10 mM indinavir. In the absence of indinavir, no binding was detected up to a concentration of 1 mM Ab0223.

[0045] FIG. 24 depicts four LS2A variants (R3M1, R4M7, R4M8, and R4M17) that were expressed as anti-EpCAM T-LITE antibodies and assessed in a co-culture assay measuring TDCC of target cells and activation of T-cells (CD69 upregulation). The T-LITE induced activation of T-cells or killing of target cells only in the presence of indinavir, demonstrating switchable activation of the T-LITE. The degree of T-LITE activity was dose-dependent, indicating the minimum amount of anti-EpCAM T-LITE required for T-cell redirection under these conditions. T-LITE required for Some LS2A variants were more potent, exhibiting lower half-maximal effective concentration (EC50) and higher maximum Specific Cytotoxicity values. The assay was performed with 10 nM antibodies (or titrated as indicated), 1 μM indinavir or DMSO vehicle, human T-cells and HCT-116 target cells for 66 hours. In some wells, a conventional TCE (Ab1092) was titrated as a positive control.

[0046] FIG. 25 depicts four LS2A variants (R4M20, R4M23, R4M27 and R4M32) that were expressed as anti-EpCAM T-LITE antibodies and assessed in a co-culture assay as described for FIG. 24. Some LS2A variants were more potent, exhibiting lower EC50 and higher maximum Specific Cytotoxicity values.

[0047] FIG. 26 depicts four LS2A variants (R3M1, R4M7, R4M8, and R4M17) that were expressed as anti-EpCAM T-LITE antibodies and assessed in a co-culture assay measuring TDCC of target cells and activation of T-cells (CD69 upregulation). The degree of T-LITE activity was dependent on the concentration of indinavir, indicating the minimum amount of indinavir required for T-cell redirection under these conditions. Some LS2A variants were more potent, exhibiting lower EC50 and higher maximum Specific Cytotoxicity values. The assay was performed with 10 nM antibodies, indinavir (titrated as indicated) or DMSO vehicle, human T-cells and HCT-116 target cells for 66 hours.

[0048] FIG. 27 four LS2A variants (R4M20, R4M23, R4M27 and R4M32) that were expressed as anti-EpCAM T-LITE antibodies and assessed in a co-culture assay as described for FIG. 26. Some LS2A variants were more potent, exhibiting lower EC50 and higher maximum Specific Cytotoxicity values.

[0049] FIG. 28 depicts the protein expression levels of exemplary SP34 molecules. Briefly, clarified supernatants were quantified by BLI using AHQ biosensors and standard manufactures protocols. Sample concentrations were extrapolated from a standard curve generated with an IgG reference molecule diluted in Expi293F media.

[0050] FIG. 29 demonstrates the binding of humanized SP34 variants to CD3e in a single-point kinetic screen. Binding was measured by biolayer interferometry (BLI). Biotinylated-CD3e was captured by streptavidin biosensors and single-point kinetics was measured to humanized SP34 variants Ab0486-Ab0558. Figure shows the nine humanized variants that demonstrated binding to CD3e and the control Ab0599 (murine SP34).

[0051] FIG. 30 depicts eight exemplary humanized SP34 variants and the murine parental SP34 that were expressed as anti-EpCAM conventional TCE antibodies and assessed in a co-culture assay measuring TDCC of target cells and activation of T-cells (CD69 upregulation). All SP34 variants caused dose-dependent T-cell activation and target cell killing. Some SP34 variants were more potent, exhibiting lower EC50 values. The assay was performed with up to 10 nM antibodies (titrated as indicated), human T-cells and MCF-7 target cells for 70 hours.

[0052] FIG. 31 shows the pharmacokinetic profile of hSP34v68 scFv-Fc in WT mice. Ab0632 (Trastuzumab scFv-Fc) and Ab0640 (hSP34v68 scFv-Fc) were administered as a single IV dose at 6.7 mg/kg in female C57BL/6 mice aged 10-12 weeks (n=5 per group). Plasma samples were collected at 30 min, 24 hr, 72 hr, and 168 hr and concentrations of the antibodies were determined by ELISA.

[0053] FIG. 32 depicts Ab1070 binding to human and cynomolgus macaque PBMCs. Binding was measured by flow cytometry using a secondary fluorescent antibody (IgG-PE). T-cell subsets were identified using additional fluorescent antibodies against TCRab, CD4 and CD8 and gated prior to quantifying the median fluorescence intensity (MFI) of the IgG-PE channel. Binding was dose-dependent and occurred at similar EC50s across the two species, demonstrating similar binding to both species. The assay was performed with up to 10 μM antibodies (titrated as indicated).

[0054] FIG. 33 depicts anti-EpCAM Fabs expressed as conventional TCE antibodies and assessed in a co-culture assay measuring TDCC of target cells. A panel of four target cell lines was used to demonstrate that expression of human or cynomolgous macaque EpCAM on target cells was required for cell killing with antibody clone M37. The potency of killing was similar on CHO target cells recombinantly expressing human EpCAM (CHO-huEpCAM) or cynomolgus macaque EpCAM (CHO-cyEpCAM), demonstrating similar potency against target cells from the two species. A conventional TCE bearing the MOC31 anti-EpCAM Fab was included as a positive control (Ab619). Killing of HCT-116 cells was not tested with Ab682 in this experiment. The assay was performed with up to 10 nM antibodies (titrated as indicated) with human T-cells and various target cells (as indicated) for 68 hours.

[0055] FIG. 34 depicts Ab1070 binding to either an A-431 cell line that was genetically knocked-out for human EpCAM (AEKO), or AEKO cells subsequently overexpressing human EpCAM (AEPO). Binding was measured by flow cytometry using a secondary fluorescent antibody (IgG-PE) and quantified as the median fluorescence intensity (MFI) of the IgG-PE channel. Binding was dose-dependent and only observed on the AEPO cell line, demonstrating that expression of EpCAM is required for binding by the M37 anti-EpCAM clone. The assay was performed with up to 1 μM antibodies (titrated as indicated).

[0056] FIG. 35 depicts antibody clone M37 expressed as a conventional TCE antibody and assessed in a co-culture assay measuring TDCC of target cells and activation of T-cells (CD69 upregulation). Target cells were either HCT-116 cells, or an A-431 cell line that was genetically knocked-out for human EpCAM (AEKO), or AEKO cells subsequently overexpressing human EpCAM (AEPO). The assay was performed with up to 1 nM antibodies (titrated as indicated) with human T-cells and various target cells (as indicated) for 69 hours. T-cell activation and killing of target cells was only observed with AEPO or HCT-116 target cells, demonstrating a requirement for EpCAM expression for T-cell redirection by the M37 antibody clone. In a separate experiment, surface staining of EpCAM on the three cell lines was performed with a commercially available FITC-conjugated anti-EpCAM antibody (BioLegend; clone 9C4) per the manufacturer's instructions. Surface staining demonstrated that AEPO and HCT-116 cells express high levels of EpCAM whereas AEKO cells express a background level of autofluorescence.

[0057] FIG. 36 depicts schematics of formats of CCs and CTs explored in exemplary T-LITE SAR campaign. Format (Fab vs. scFv) as well as valency (1+1 vs. 2+1, vs. 2+1) were explored.

[0058] FIG. 37 depicts TDCC data for an exemplary pair from the SAR campaign, Ab439+Ab649. The T-LITE pair was assessed in a co-culture assay measuring TDCC of target cells. The T-LITE pair exhibited indinavir-dependent killing of target cells. The degree of killing was dependent on the concentration of anti-EpCAM T-LITE antibody (Ab439) and the concentration of indinavir. The assay was performed with 10 nM antibodies (or titrated as indicated), 40 μM indinavir or DMSO vehicle, human T-cells and MCF-7 target cells for 81 hours. In some wells, a conventional TCE (Ab619) was titrated as a positive control.

[0059] FIG. 38 depicts co-culture TDCC data for two exemplary T-LITE pairs. The T-LITE pairs (Ab1093+Ab1060 and Ab1094+Ab1091) were assessed in a co-culture assay measuring TDCC of target cells. Both T-LITE pairs exhibited indinavir-dependent killing of target cells. The degree of killing was dependent on the concentration of anti-EpCAM T-LITE antibody (Ab1093 or Ab1094), the concentration of anti-CD3 T-LITE antibody (Ab1060 or Ab1091), and the concentration of indinavir. The assay was performed with 10 nM antibodies (or titrated as indicated), 1 μM indinavir (or titrated as indicated) or DMSO vehicle, human T-cells and HCT-116 target cells for 69 hours.

[0060] FIG. 39 depicts co-culture TDCC data for two exemplary T-LITE pairs that exhibited indinavir-independent activity. The T-LITE pairs (Ab1059+Ab1060 and Ab1089+Ab1091) were assessed in a co-culture assay measuring TDCC of target cells. Both T-LITE pairs exhibited undesirable killing of target cells in the absence of indinavir, which could be described as lack of switchable activity. The degree of killing was dependent on the concentration of anti-EpCAM T-LITE antibody (Ab1093 or Ab1094) or the concentration of anti-CD3 T-LITE antibody (Ab1060 or Ab1091), but was independent of the concentration of indinavir. The assay was performed with 10 nM antibodies (or titrated as indicated), 1 μM indinavir (or titrated as indicated) or DMSO vehicle, human T-cells and HCT-116 target cells for 69 hours.

[0061] FIG. 40 depicts cytokine production induced by T-LITE antibodies or conventional TCE antibodies in a co-culture assay. The co-culture assay was performed with three T-LITE pairs (Ab1093+Ab1060, Ab1094+Ab1060, or Ab1094+Ab1091) as described for FIG. 38. The anti-CD3 T-LITE antibodies were titrated (as indicated) while holding the anti-EpCAM T-LITE antibodies constant at 10 nM, with or without 1 μM indinavir. In some wells, conventional TCE antibodies (Ab1070 or Ab1092) were titrated as positive controls. Cell culture media was taken for multiplexed cytokine analysis at the conclusion of the experiment (69 hours of co-culture). T-LITEs caused dose-dependent and indinavir-dependent production of cytokines, but the maximum amount of cytokine production was markedly lower than that induced by the conventional TCE controls. Even at doses of T-LITE that were sufficient to induce cytotoxicity of target cells (FIG. 38), the degree of cytokine production was not as great that induced by the conventional TCE antibodies, thereby demonstrating a decoupling of cytotoxic activity and cytokine production.

[0062] FIG. 41 depicts cytokine production by T-LITE antibodies or conventional TCE antibodies in a co-culture assay. The co-culture assay was performed with three T-LITE pairs (Ab1093+Ab1060, Ab1094+Ab1060, or Ab1094+Ab1091) as described for FIG. 38. The anti-CD3 and anti-EpCAM T-LITE antibodies were held constant at 10 nM while titrating indinavir (as indicated). Cell culture media was taken for multiplexed cytokine analysis at the conclusion of the experiment (69 hours of co-culture). T-LITEs caused dose-dependent and indinavir-dependent production of cytokines.

[0063] FIG. 42 depicts real-time measurement of TDCC in a co-culture assay for three exemplary T-LITE pairs. The T-LITE pairs (Ab778+Ab904, Ab1069+Ab1064, or Ab1069+Ab904) were assessed in a co-culture assay measuring TDCC of fluorescent-tagged target cells by real-time microscopy. T-LITE antibodies were held constant at 10 nM with indinavir (250 nM) added to some wells, as indicated (“ON”). In some wells, a conventional TCE (Ab1007) was included as a positive control. In some wells, an anti-indinavir quencher antibody (5 μM) was added at various time points, as indicated (“OFF”). All T-LITE pairs exhibited indinavir-dependent killing of target cells. In some wells, no indinavir was added (“Always OFF”). Killing was interrupted by the addition of the quencher at earlier time points (“OFF at” 30 min, 24 h, 44 h, or 49 h). Killing occurred at levels similar to the no-quencher condition (“Always ON”) if the quencher was added at the latest time point (68 h). The assay was performed with human T-cells and HCT-116-NR target cells for 120 hours. The use of a quencher to sequester indinavir in this closed in vitro system demonstrates that the formation of the active T-LITE complex can be reversed by making indinavir unavailable for complex formation, and that this reversal has functional consequences on the behavior of T-cells.

[0064] FIG. 43 depicts example expression and purification data for exemplary antibodies. SEC-HPLC data depicts a monodisperse peak for Ab1059 and Ab0160 subsequent to CH1 affinity purification and preperative SEC purification. % Main peak and % aggregate peak are denoted in each case along with final yield from 1 Liter expression in Expi293F cells. SDS-PAGE shows bands at the expected molecular weights and demonstrates that each antibody is >95% pure. Mass spectrometry using a Waters ACQUITY UPLC coupled to XevoG2-XS QTOF mass spectrometer shows peaks corresponding to the expected molecular weight (within expected accuracy of the instrument) and further supporting the purity of the preparations.

[0065] FIG. 44 shows the pharmacokinetic profile of T-LITE antibodies in WT mice. Ab1059, Ab1060, Ab1089, Ab1091 are T-LITE antibodies. Ab0654 is trastuzumab. Ab1070 is a T-cell engager antibody. All antibodies were dosed at the molar equivalent of 10 mg/kg IgG in female C57BL/6 mice (n=5 per group). Plasma samples were collected at 15 min, 1 hr, 6 hr, 24 hr, 72 hr, 144 hr, and 240 hr and concentrations of the antibodies were determined by ELISA.

[0066] FIG. 45 depicts the pharmacokinetic profile of a αCD3 T-LITE antibody in cynomolgus macaques. Cynomolgus macaques were injected with Ab1060 as a single intravenous infusion over 15 minutes at doses from 0.1 to 3.0 mg/kg (n=1 animals per dose level). Blood samples were collected at 1 hr, 3 hr, 6 hr, 1 d, 2 d, 3 d, 4 d, 5 d, 6 d, 7 d, 8 d, 9 d, and 10 d post-infusion with potassium EDTA as the anticoagulant, then processed to plasma and frozen. Antibody concentrations in plasma were measured using an ELISA specific for human IgG. Ab1060 exhibited a plasma half-life of 4-6 days in cynomolgus macaques.

[0067] FIG. 46 depicts dose-dependent binding of a αCD3 T-LITE antibody to the surface of peripheral T-cells cynomolgus macaques. Cynomolgus macaques were injected with Ab1060 as a single intravenous infusion over 15 minutes at doses from 0.1 to 3.0 mg/kg (n=1 animals per dose level). Whole blood samples were collected at 1, 24, 48, 72, 96, 168, 192 and 240 hours post-infusion with potassium EDTA as the anticoagulant. The amount of surface-bound Ab1060 was detected using a fluorescent PE-conjugated anti-human IgG antibody measured by flow cytometry. The median fluorescence intensity (MFI) was normalized to the maximum MFI observed across all samples in the experiment. Ab1060 exhibited dose-dependent binding to CD4+ T-cells in cynomolgus macaques.

[0068] FIG. 47 depicts changes in body weight and plasma cytokine levels in B-hCD3E transgenic mice treated with a single dose of the αCD3 T-LITE antibody or a control TCE. The control TCE contains an anti-mouse EpCAM Fab instead of the LS2B domains, and would therefore be expected to redirect T-cells to target endogenous EpCAM-expressing tissues. Mice were injected with Ab1062 or Ab1060 as a single bolus intravenous injection at doses of 1 or 10 mg/kg, respectively (n=4 animals per dose level). Body weights were measured 3 and 5 days post-injection. Whole blood samples were collected at −96, 2, 6, 24, 72, and 120 hours relative to the time of injection, with potassium EDTA as the anticoagulant. The concentration of 18 cytokines in the plasma were measured using a bead-based multiplex assay. The control TCE, Ab1062, induced body weight loss at dose of 1 mg/kg, whereas Ab1060 did not at a dose of 10 mg/kg. Furthermore, Ab1062 caused dramatic cytokine release within 24 hours of injection, whereas Ab1060 caused a much lower degree of cytokine release.

[0069] FIG. 48 depicts co-culture TDCC data for an exemplary T-LITE pair and a conventional TCE on isogenic cell lines with different surface expression of human EpCAM. A panel of isogenic cell lines was created using the Calu-6 human lung cancer cell line as a starting point. Based on literature values for surface expression of EpCAM, Calu-6 expresses 40,926 copies/cell, whereas HCT-116 expresses approximately 100-fold higher levels at 4,753,190 copies/cell (Casaletto et al., PNAS 2019; doi: 10.1073/pnas.1819085116). Human EpCAM was expressed on the Calu-6 background using lentiviral vectors with different strength promoters. Subclones were isolated, resulted in an isogenic panel of four Calu-6 EpCAM-overexpressing (CEPO) cell lines with varying levels of EpCAM expression (CEPO-L2A2, CEPO-HB3, CEPO-HA2, and CEPO-HB2). Relative surface expression of human EpCAM on each cell line was measured by flow cytometry, as well as parental Calu-6 cells and HCT-116 as controls. The conventional TCE control Ab1070 and a T-LITE pair (Ab1093+Ab1060) were assessed in a co-culture assay measuring TDCC of either CEPO-HB2 or CEPO-L2A2 target cells, representing high and low expression of EpCAM, respectively. The assay was performed with 10 nM antibodies (or titrated as indicated), 100 nM indinavir or DMSO vehicle, human T-cells and a variety target cells (as indicated) for 67 hours. Flow cytometry was performed using a PE-conjugated fluorescent anti-human EpCAM antibody (clone 9C4).

[0070] FIGS. 49 and 50 depict sequences for additional exemplary iCID domains.

### IV. DETAILED DESCRIPTION OF THE INVENTION

### A. Introduction

[0071] Major limitation of current T cell engaging therapeutics is their toxicity, including acute cytokine release syndrome, neuro toxicities, and/or “on-target off-tumor” toxicities (wherein the therapeutic binds to normal tissue rather than tumor tissue). The present invention may address the drawbacks of current T cell engaging therapeutics by controlling the formation of the T cell engaging complexes in such a way that both its formation and its dissociation can be controlled using small molecules as generally outlined in FIGS. 1A-1D, 2 and 3. This mechanism is generally referred to herein as “chemically induced dimerization” or “CID”. Two CID domains may not bind to each other in the absence of a third component, the small molecule. The two CID domains can be brought together by a small molecule (referred to generally herein as a “CID small molecule”, or “CID-SM”). In some embodiments, an anti-CD3 antigen binding domain (αCD3-ABD) is linked to one or more CID domains, and one or more anti-tumor targeting antigen binding domains (αTTABD) are linked to the other CID domain. Furthermore, in some embodiments, the present invention includes the use of a co-stimulatory activity by linking a T cell co-stimulatory domain directly or indirectly to the αTTABDs. In one aspect, a small molecule brings together the two CID domains, and thus brings together the αCD3-ABD, αTTABDs and co-stimulatory domain, allowing for T cell engagement and tumor killing.

[0072] However, when administration of the small molecule drug to the patient is stopped or reduced, the T cell engaging complex can then disassociate and any toxicities of the complex are decreased. That is, the use of these two CID domains thus function as a molecular “switch”, allowing control over the biological activity of the complexes. Manipulating the concentration of small molecule can enable temporal or spatial control over the formation of the functional T cell engaging complexes. Temporal control may be achieved by changing the amount of small molecule in the blood (e.g., by increasing, decreasing, or halting the administration of small molecule to the patient). In another aspect, spatial control may be achieved by injecting the small molecule at a specific site of desired drug activity (e.g., via intratumoral injection). Pulsatile dosing of the small molecule may be used to provide periods of activation, rest and re-activation to the T cells, thereby mimicking repeated exposures to a natural pathogen.

[0073] In the present case, the small molecule is indinavir. The structure of indinavir is shown in FIG. 4. Accordingly, there are two different CID domains that utilize indinavir, referred to herein as “indinavir chemically induced dimerization domains,” “iCID domains,” or “iCIDs”. One of the iCID domains binds indinavir, and is called an indinavir binding domain. The other iCID domain binds the complex of the first iCID with indinavir and is referred to herein as the “indinavir-complex binding domain”. That is, the indinavir-complex binding domain will not bind to the first iCID if indinavir is not present. In general, as outlined herein, these iCID domains are generally Fv domains, and most usually scFv domains comprising variable heavy domains and variable domains linked by a scFv linker in different orientations, as described more fully below.

[0074] There are three basic formats of the compositions of the invention as outlined herein, and all are referred to as T-cell Ligand Induced Transient Engager (“T-LITEs™”) compositions, sometimes referred to as “complexes” as shown in FIGS. 1A-1D, 2 and 3. In the first, “standard T-LITE™ format”, (“Format 1”) the compositions have two separate protein components that act in tandem, or in pairs, to give functionality when exposed to indinavir that brings the two protein components together in a complex. However, without the iCID small molecule, the T-LITE™ compositions do not have the required two functions of a T cell engager in one complex: the ability to bind CD3 (and thus activate T cell-mediated cytotoxicity) and the ability to bind a tumor cell.

[0075] As discussed more fully below, in one aspect, the iCID domains of the invention function generally in pairs. In an exemplary T-LITE™ composition, one protein component has one or more iCID domains and an αCD3-ABD (which as described more fully herein can take on a number of different forms); this protein component is referred herein as the “CC” binding protein, since it has a iCID domain and an anti-CD3 antigen binding domain. The other protein component of the T-LITE™ composition has the other iCID domain and an αTTABD, referred to generally as the “CT” binding protein, since it has a iCID and anti-Tumor targeting antigen binding domain. Additionally, in many embodiments herein, the functional domains of each protein component can be assembled using Fc domains, which spontaneously self-assemble. In many embodiments, the inventions rely on Fc domains that contain amino acid modifications that result in “heterodimerization”, wherein two non-identical Fc domains will self-assemble, thus bringing the two functionalities together into either a CT fusion protein or a CC fusion protein. The CT fusion protein and the CC fusion protein then come together in the presence of indinavir, to form an active T cell engaging complex, as generally shown in FIG. 1B.

[0076] Additionally, as is further discussed below, each protein component of the T-LITE™ complex can have a number of different formats, in terms of the order of the functional domains within the polypeptide chains. In some instances, the selected arrangement of domains within proteins employed in the T-LITE composition provides for an improvement, e.g., in synthesis, stability, affinity or effector function, over others of these structures or those known in the art.

[0077] An additional exemplary format of the present invention is called a “BrighT-LITE™” format (“Format 2”) which additionally contain one or more T cell co-stimulatory domain(s). The compositions are referred to herein as BrighT-LITEs™, because they include co-stimulatory targeting domains, that serve to “turn up” the T-LITE™s. The BrighT-LITE™ compositions, like Format 1, have two separate components that act in tandem, or in pairs, to give functionality when exposed to indinavir that brings the two components together in a complex. However, without indinavir, the BrighT-LITE™ compositions do not have the required two functions of a T cell engager in one complex: the ability to bind CD3 (and thus activate T cell-mediated cytotoxicity) and the ability to bind a tumor cell.

[0078] As discussed more fully below, and similar to Format 1, in one aspect, the iCID domains of the invention function generally in pairs. In Format 2, one protein component has one or more iCID domains and an αCD3-ABD (which as described more fully herein can take on a number of different forms); this protein component is referred herein as the “CC” binding protein, since it has an iCID domain and an anti-CD3 antigen binding domain. The other protein component of the BrighT-LITE™ composition has the other iCID domain, an αTTABD and a Co-Stimulatory domain; this protein component is referred herein as the “CTCoS” binding protein. All three formats of the invention utilize CC binding proteins.

[0079] Additionally, in many embodiments herein, as is true for Format 2, the functional domains of each protein component can be assembled using Fc domains, which spontaneously self-assemble. In many embodiments, the inventions rely on Fc domains that contain amino acid modifications that result in “heterodimerization”, wherein two non-identical Fc domains will self-assemble, thus bringing the two functionalities together into either a CTCoS binding protein or a CC binding protein. The CTCoS binding protein and CC binding protein then come together in the presence of the CID small molecule, to form an active T cell engaging complex, as generally shown in FIG. 2.

[0080] Additionally, as is further discussed below, each protein component of the Format 2 complex can have a number of different formats, in terms of the order of the functional domains within the polypeptide chains as well as the number of polypeptide chains in each protein. In some instances, the selected arrangement of domains within proteins employed in a BrighT-LITE™ format composition provides for an improvement, e.g., in synthesis, stability, affinity or effector function, over the structures generally known in the art.

[0081] The third exemplary format, “Format 3”, is a dual targeting BrighT-LITEs™, because Format 3 constructs include a second targeting domain. As for Formats 1 and 2, the iCID domains of the invention function generally in pairs. In Format 3 compositions, one protein component has one iCID domain and an αCD3-ABD (which as described more fully herein can take on a number of different forms); this protein component is referred herein as the “CC” binding protein, since it has a iCID domain and an anti-CD3 antigen binding domain. The other protein component of the Format 3 composition comprises the other iCID domain, two or more αTTABDs and a Co-Stimulatory domain; this protein component is referred herein as the “CTTCoS” binding protein.

[0082] In the Format 3 compositions, engagement of the co-stimulatory domain can increase the activation state of the T-cell resulting in enhanced cytotoxicity, and enhanced cytokine profiles relative to a bispecific T-cell engager comprising an αCD3-ABD and αTTABD without a co-stimulatory domain. The two or more αTTABDs can bind to the same tumor antigen or two different tumor antigens. In one aspect, advantages of having two or more αTTABDs can include conferring increased potency to tumor targeting antigens (TTAs) due to increased avidity provided by the two tumor antigen binders. Further, in some embodiments, an αTTABD with a lower affinity can be used to increase selectivity of a CTTCoS binding protein. Use of multivalent interactions can favor association of a CTTCoS binding protein with cells expressing high levels of a TTA. Therefore, in some instances, selectivity for high-TTA expressing tumor cells can be achieved over healthy tissue expressing lower levels of the TTA.

[0083] Additionally, in many embodiments herein, the functional domains of each protein component can be assembled using Fc domains, which spontaneously self-assemble. In many embodiments, the inventions rely on Fc domains that contain amino acid modifications that result in “heterodimerization”, wherein two non-identical Fc domains will self-assemble, thus bringing the two functionalities together into either a CTTCoS binding protein or a CC binding protein. The CTTCoS binding protein and CC binding protein then come together in the presence of the iCID small molecule, to form an active T cell engaging complex, as generally shown in FIG. 3.

[0084] Additionally, as is further discussed below, each protein component of the Format 3 compositions can have a number of different formats, in terms of the order of the functional domains within the polypeptide chains as well as the number of polypeptide chains in each protein. In some instances, the selected arrangement of domains within proteins employed in a BrighT-LITE composition provides for an improvement, e.g., in synthesis, stability, affinity or effector function, over the structures generally known in the art.

### B. Definitions

[0085] In order that the application may be more completely understood, several definitions are set forth below. Such definitions are meant to encompass grammatical equivalents.

[0086] Unless explained otherwise, all technical and scientific terms used herein have the same meaning as commonly understood to one of ordinary skill in the art to which this disclosure belongs.

[0087] Accession Numbers: Reference numbers assigned to various nucleic acid and amino acid sequences in the NCBI database (National Center for Biotechnology Information) that is maintained by the National Institute of Health, U.S.A. The accession numbers listed in this specification are herein incorporated by reference as provided in the database as of the date of filing this application.

[0088] The term “antigen binding domain” or “ABD” herein is meant a set of six Complementary Determining Regions (CDRs) that, when present as part of a polypeptide sequence, specifically binds a target antigen as discussed herein. Thus, for example, an ABD that binds CD3 is referred to herein as a “αCD3-ABD”. As is known in the art, these CDRs are generally present as a first set of variable heavy CDRs (vhCDRs or VHCDRs) and a second set of variable light CDRs (vlCDRs or VLCDRs), each comprising three CDRs: vhCDR1, vhCDR2, vhCDR3 for the heavy chain and vlCDR1, vlCDR2 and vlCDR3 for the light chain. The CDRs are present in the variable heavy domain (VH) and variable light domain (VL), respectively, and together form an Fv region. Thus, in some cases, the six CDRs of the antigen binding domain are contributed by a variable heavy and variable light chain. For example, in a scFv format, the VH and VL domains are covalently attached, generally through the use of a linker as outlined herein, into a single polypeptide sequence, which can be either (starting from the N-terminus) VH-linker-VL or VL-linker-VH, with the former being generally preferred (including optional domain linkers on each side, depending on the format used). In some cases, the linker is a domain linker as described herein. Thus, included within the definition of “antigen binding domains” are “scFv antigen binding domains”, or scFv-ABDs.

[0089] Additionally, in some cases, an ABD used in the invention can be a single domain ABD (“sdABD”). By “single domain Fv”, “sdFv” or “sdABD” herein is meant an antigen binding domain that only has three CDRs, generally based on camelid antibody technology. See: Protein Engineering 9(7):1129-35 (1994); Rev Mol Biotech 74:277-302 (2001); Ann Rev Biochem 82:775-97 (2013). These are sometimes referred to in the art as “VHH” domains.

[0090] As will be appreciated by those in the art, the exact numbering and placement of the CDRs can be different among different numbering systems. However, it should be understood that the disclosure of a variable heavy and/or variable light sequence includes the disclosure of the associated (inherent) CDRs. Accordingly, the disclosure of each variable heavy region is a disclosure of the VHCDRs (e.g., VHCDR1, VHCDR2 and VHCDR3) and the disclosure of each variable light region is a disclosure of the VLCDRs (e.g., VLCDR1, VLCDR2 and VLCDR3).

[0091] A useful comparison of CDR numbering is as below, see Lafranc et al., Dev. Comp. Immunol. 27(1):55-77 (2003). Throughout the present specification, the Kabat numbering system is generally used when referring to a residue in the variable domain (approximately, residues 1-107 of the light chain variable region and residues 1-113 of the heavy chain variable region) and the EU numbering system for Fc regions (e.g, Kabat et al., SEQUENCES OF PROTEINS OF IMMUNOLOGICAL INTEREST, 5th Ed. Public Health Service, National Institutes of Health, Bethesda, Md. (1991)).

TABLE 1

| | Kabat + | | | | | |
|---|---|---|---|---|---|---|
| | Chothia | IMGT | Kabat | AbM | Chothia | Contact |
| VHCDR1 | 26-35 | 27-38 | 31-35 | 26-35 | 26-32 | 30-35 |
| VHCDR2 | 50-65 | 56-65 | 50-65 | 50-58 | 52-56 | 47-58 |
| VHCDR3 | 95-102 | 105-117 | 95-102 | 95-102 | 95-102 | 93-101 |
| VLCDR1 | 24-34 | 27-38 | 24-34 | 24-34 | 24-34 | 30-36 |
| VLCDR2 | 50-56 | 56-65 | 50-56 | 50-56 | 50-56 | 46-55 |
| VLCDR3 | 89-97 | 105-117 | 89-97 | 89-97 | 89-97 | 89-96 |

[0092] By “domain linker” or grammatical equivalents herein is meant a linker that joins two protein domains together, such as those used in linking the different domains of a protein. As is more fully described below, generally, there are a number of suitable linkers that can be used, including traditional peptide bonds, generated by recombinant techniques that allows for recombinant attachment of the two domains with sufficient length and flexibility to allow each domain to retain its biological function.

[0093] “Epitope” refers to a determinant that interacts with a specific antigen binding site in the variable region of an antibody molecule known as a paratope. Epitopes are groupings of molecules such as amino acids or sugar side chains and usually have specific structural characteristics, as well as specific charge characteristics. A single antigen may have more than one epitope. Epitopes may be either conformational or linear. A conformational epitope is produced by spatially juxtaposed amino acids from different segments of the linear polypeptide chain. A linear epitope is produced by adjacent amino acid residues in a polypeptide chain. Conformational and linear epitopes may be distinguished in that the binding to the former but not the latter is lost in the presence of denaturing solvents.

[0094] By “modification” herein is meant an amino acid substitution, insertion, and/or deletion in a polypeptide sequence or an alteration to a moiety chemically linked to a protein. For example, a modification may be an altered carbohydrate or PEG structure attached to a protein. By “amino acid modification” herein is meant an amino acid substitution, insertion, and/or deletion in a polypeptide sequence. For clarity, unless otherwise noted, the amino acid modification is always to an amino acid coded by DNA, e.g., the 20 amino acids that have codons in DNA and RNA.

[0095] By “amino acid substitution” or “substitution” herein is meant the replacement of an amino acid at a particular position in a parent polypeptide sequence with a different amino acid. For clarity, a protein which has been engineered to change the nucleic acid coding sequence but not change the starting amino acid (for example exchanging CGG (encoding arginine) to CGA (still encoding arginine) to increase host organism expression levels) is not an “amino acid substitution”; that is, despite the creation of a new gene encoding the same protein, if the protein has the same amino acid at the particular position that it started with, it is not an amino acid substitution.

[0096] By “amino acid insertion” or “insertion” as used herein is meant the addition of an amino acid sequence at a particular position in a parent polypeptide sequence. For example, −233E or 233E designates an insertion of glutamic acid after position 233 and before position 234. Additionally, −233ADE or A233ADE designates an insertion of AlaAspGlu after position 233 and before position 234.

[0097] By “amino acid deletion” or “deletion” as used herein is meant the removal of an amino acid sequence at a particular position in a parent polypeptide sequence. For example, E233- or E233 #, E233( ) or E233del designates a deletion of glutamic acid at position 233. Additionally, EDA233- or EDA233 #designates a deletion of the sequence GluAspAla that begins at position 233.

[0098] By “variant”, e.g., “variant polynucleotide sequence”, “variant amino acid sequence”, “variant polypeptide”, “variant protein” or “protein variant”, as used herein is meant a composition, e.g., a polynucleotide sequence, amino acid sequence, polypeptide or protein, that differs from that of a respective parent composition, e.g., a polynucleotide, amino acid sequence, polypeptide or protein, by virtue of at least one modification, e.g., a nucleotide or an amino acid modification. For example, protein variant may refer to the protein itself, a composition comprising the protein, or the amino acid sequence that encodes it. Variant polypeptide may refer to the polypeptide itself, a composition comprising the polypeptide, or the amino acid sequence that encodes it. Variant polynucleotide may refer to the polynucleotide itself, a composition comprising the polynucleotide, or the nucleic acid sequence that encodes it. Generally, unless otherwise noted herein, the parent composition is a wild type polynucleotide, polypeptide or protein

[0099] By “wild type or WT”, e.g. “wild type nucleotide sequence”, “wild type amino acid sequence”, “wild type polypeptide, or “wild type protein”, as used herein is meant a composition, e.g., a nucleotide sequence, amino acid sequence, polypeptide, or protein, that is found in nature, including allelic variations. A WT protein has an amino acid sequence or a nucleotide sequence that has not been intentionally modified.

[0100] By non-naturally occurring, e.g., a “non-naturally occurring variant” or “non-naturally occurring modification” it is meant an amino acid modification that is not observed in nature. As one nonlimiting example, a non-naturally occurring variant IgG domain would include an IgG domain comprising an amino acid modification that is not isotypic. For example, because none of the IgGs comprise an alanine at position 234 and 235, the substitution 234A and 235A in IgG1 and IgG4 is considered a non-naturally occurring modification at position 234.

[0101] As used herein, “protein” herein is meant at least two covalently attached amino acids, which includes proteins, polypeptides, oligopeptides and peptides. A protein comprises naturally occurring amino acids and peptide bonds. In addition, a protein may include synthetic derivatization of one or more side chains or termini, glycosylation, PEGylation, circular permutation, cyclization, linkers to other molecules, fusion to proteins or protein domains, and addition of peptide tags or labels. “Polypeptide”, as a subset of “protein”, refers to a protein that is a single amino acid chain, while “protein” can refer to one or more amino acid chains.

[0102] By “residue” as used herein is meant a position in a protein and its associated amino acid identity.

[0103] By “Fab” or “Fab region” as used herein is meant the polypeptide that comprises the VH, CH1, VL, and CL immunoglobulin domains. Fab may refer to this region in isolation, or this region in the context of a full length antibody or antibody fragment. In some cases, as generally outlined below, the Fabs can be single chain Fabs (scFab), that have the VH-CH1 domains linked by a scFab linker of an appropriate length and flexibility to the VL-CL domains, wherein the scFab retains the specificity of the intact antibody from which it is derived. These domains can be in either the (N- to C-terminal) VH-CH1-scFab linker-VL-CL or VL-CL-scFab linker-VH-CH1 orientations.

[0104] By “Fv” or “Fv fragment” or “Fv region” as used herein is meant a polypeptide that comprises the VL and VH domains of a single antibody. As will be appreciated by those in the art, an Fv is made up of two domains, a variable heavy domain and a variable light domain. In the case of sdABDs, the Fv domain comprises just a VHH domain.

[0105] As used herein, “single chain variable fragment” or “scFv” refers to an antibody fragment comprising a variable heavy domain and a variable light domain, wherein the variable heavy domain and a variable light domain are contiguously linked via a short flexible polypeptide linker, and capable of being expressed as a single polypeptide chain, and wherein the scFv retains the specificity of the intact antibody from which it is derived. The variable heavy domain and a variable light domain of a scFv can be, e.g., in any of the following orientations: variable light domain-scFv linker-variable heavy domain or variable heavy domain-scFv linker-variable light domain.

[0106] By “effector function” as used herein is meant an effector function of an antibody Fc region, which is a biochemical event that results upon binding of an antibody Fc region with an Fc receptor or ligand, e.g. ADCC, ADCP, CDC, and the like.

[0107] By “Fc” or “Fc region” or “Fc domain” as used herein is meant a polypeptide comprising the constant region of an antibody, in some instances, excluding all of the first constant region immunoglobulin domain (e.g., CH1) or a portion thereof, and in some cases, optionally including all or part of the hinge domain. The Fc domain disclosed herein may be Fc domain from IgG. For IgG, the Fc domain comprises immunoglobulin domains CH2 and CH3 (Cγ2 and Cγ3), and optionally all or a portion of the hinge region between CH1 (Cγ1) and CH2 (Cγ2). Thus, in some cases, the Fc domain includes, from N- to C-terminus, CH2-CH3 or hinge-CH2-CH3. In some embodiments, the Fc domain is that from IgG1, IgG2, IgG3 or IgG4, with IgG1 hinge-CH2-CH3 finding particular use in many embodiments. Additionally, in certaIn some embodiments, wherein the Fc domain is a human IgG1 Fc domain, the hinge includes a C220S amino acid substitution. Furthermore, in some embodiments where the Fc domain is a human IgG4 Fc domain, the hinge includes a S228P amino acid substitution. Although the boundaries of the Fc region may vary, the human IgG heavy chain Fc region is usually defined to include residues E216, C226, or A231 to its carboxyl-terminus, wherein the numbering is according to the EU index as in Kabat. Accordingly, “CH” domains in the context of IgG are as follows: “CH1” refers to positions 118-215 according to the EU index as in Kabat. “Hinge” refers to positions 216-230 according to the EU index as in Kabat. “CH2” refers to positions 231-340 according to the EU index as in Kabat, and “CH3” refers to positions 341-447 according to the EU index as in Kabat. In some embodiments, as is more fully described below, amino acid modifications are made to the Fc region, for example to alter binding to one or more FcγR or to the FcRn.

[0108] By “Fc gamma receptor”, “FcγR” or “FcgammaR” as used herein is meant any member of the family of proteins that bind the IgG antibody Fc region and is encoded by an FcγR gene. In human this family includes but is not limited to FcγRI (CD64), including isoforms FcγRIa, FcγRIb, and FcγRIc; FcγRII (CD32), including isoforms FcγRIIa (including allotypes H131 and R131), FcγRIIb (including FcγRIIb-1 and FcγRIIb-2), and FcγRIIc; and FcγRIII (CD16), including isoforms FcγRIIIa (including allotypes V158 and F158) and FcγRIIIb (including allotypes FcγRIIb-NA1 and FcγRIIb-NA2) (Jefferis et al., 2002, Immunol Lett 82:57-65, entirely incorporated by reference), as well as any undiscovered human FcγRs or FcγR isoforms or allotypes. In some cases, as outlined herein, binding to one or more of the FcγR receptors is reduced or ablated. In such cases, Fc effector function is reduced. For example, reducing binding to FcγRIIIa reduces ADCC, and in some cases, reducing binding to FcγRIIIa and FcγRIIb is desired.

[0109] By “FcRn” or “neonatal Fc Receptor” as used herein is meant a protein that binds the IgG antibody Fc region and is encoded at least in part by an FcRn gene. The FcRn may be from any organism, including but not limited to humans, mice, rats, rabbits, and monkeys. As is known in the art, the functional FcRn protein comprises two polypeptides, often referred to as the heavy chain and light chain. The light chain is beta-2-microglobulin and the heavy chain is encoded by the FcRn gene. Unless otherwise noted herein, FcRn or an FcRn protein refers to the complex of FcRn heavy chain with beta-2-microglobulin. As discussed herein, binding to the FcRn receptor is desirable, and in some cases, Fc variants can be introduced to increase binding to the FcRn receptor.

[0110] “Fc variant” or “variant Fc” as used herein is meant a protein comprising an amino acid modification in an Fc domain. The modification can be an addition, deletion, or substitution. The Fc variants of the present invention are defined according to the amino acid modifications that compose them. Thus, for example, Fc L234A/L235A is an Fc variant with the substitution for at position relative to the parent Fc polypeptide, wherein the numbering is according to the EU index. The identity of the wildtype amino acid may be unspecified, in which case the aforementioned variant is referred to as Fc 234A/235A. It is noted that the order in which substitutions are provided is arbitrary, that is to say that, for example, is the same Fc variant as, and so on. For all positions discussed herein that relate to antibodies or derivatives and fragments thereof (e.g., Fc domains), unless otherwise noted, amino acid position numbering is according to the EU index. The “EU index” or “EU index as in Kabat” or “EU numbering” scheme refers to the numbering of the EU antibody (Edelman et al., 1969, Proc Natl Acad Sci USA 63:78-85, hereby entirely incorporated by reference). The modification can be an addition, deletion, or substitution.

[0111] By “fusion protein” or “fusion polypeptide” as used herein is meant covalent joining of at least two proteins or protein domains, to form a protein of a single amino acid chain. Fusion proteins may comprise artificial sequences, e.g. a domain linker, and a CID domain as described herein and an αCD3-ABD or an αTTABD. By “Fc fusion protein” herein is meant a protein comprising an Fc domain, generally linked (optionally through a domain linker, as described herein) to one or more different protein domains. In most instances, two Fc fusion proteins will dimerize and form a homodimeric Fc protein or a heterodimeric Fc protein. In some embodiments, a heterodimeric Fc protein includes an Fc domain alone (e.g., an “empty Fc domain”) and an Fc fusion protein. In some embodiments, a heterodimeric Fc protein includes two Fc fusion proteins. In some embodiments the Fc domain is monomeric, such as when a variant IgG4 Fc domain is used, which does not self-assemble into a dimer.

[0112] By “fused” or “covalently linked” is herein meant that the components (e.g., a CID domain and an Fc domain) are linked by peptide bonds, either directly or indirectly via domain linkers, outlined herein.

[0113] By “heavy constant region” herein is meant the CH1-hinge-CH2-CH3 portion of a IgG antibody.

[0114] By “light constant region” is meant the CL domain from kappa or lambda.

[0115] By “amino acid” as used herein is meant one of the 20 naturally occurring amino acids that are coded for by DNA and RNA.

[0116] By “parent polypeptide” as used herein is meant a starting polypeptide that is subsequently modified to generate a variant. The parent polypeptide may be a naturally occurring polypeptide, or a variant or engineered version of a naturally occurring polypeptide. Parent polypeptide may refer to the polypeptide itself, compositions that comprise the parent polypeptide, or the amino acid sequence that encodes it. Accordingly, by “parent immunoglobulin” as used herein is meant an unmodified immunoglobulin polypeptide that is subsequently modified to generate a variant, and by “parent antibody” as used herein is meant an unmodified antibody that is subsequently modified to generate a variant antibody. It should be noted that “parent antibody” includes known commercial, recombinantly produced antibodies as outlined below.

[0117] By “position” as used herein is meant a location in the sequence of a protein. Positions may be numbered sequentially, or according to an established format, for example the EU index for antibody numbering.

[0118] By “target antigen” as used herein is meant the molecule that is bound specifically by the variable region of a given antibody. In the present case, for example, the target antigen of interest herein can be a CD3 protein or a tumor targeting antigen including a CD19 protein. Thus, an “anti-CD19 binding domain” is a target tumor antigen (TTA) binding domain where the target antigen is CD19. Additional target antigens are outlined below.

[0119] By “target cell” as used herein is meant a cell that expresses a target antigen.

[0120] By “variable domain” as used herein is meant the region of an immunoglobulin that comprises one or more Ig domains substantially encoded by any of the Vκ (V.kappa), Vλ (V.lamda), and/or VH genes that make up the kappa, lambda, and heavy chain immunoglobulin genetic loci respectively. Thus a “variable heavy domain” comprises (VH)FR1-vhCDR1-(VH)FR2-vhCDR2-(VH)FR3-vhCDR3-(VH)FR4 and a “variable light domain” comprises (VL)FR1-vlCDR1-(VL)FR2-vlCDR2-(VL)FR3-vlCDR3-(VL)FR4.

[0121] The antibodies of the present invention are generally recombinant. “Recombinant” means the antibodies are generated using recombinant nucleic acid techniques in exogenous host cells.

[0122] “Specific binding” or “specifically binds to” or is “specific for” a particular antigen or an epitope means binding that is measurably different from a non-specific interaction. Specific binding can be measured, for example, by determining binding of a molecule compared to binding of a control molecule, which generally is a molecule of similar structure that does not have binding activity. For example, specific binding can be determined by competition with a control molecule that is similar to the target.

[0123] The term “Kassoc” or “Ka”, as used herein, is intended to refer to the association rate of a particular antibody-antigen interaction, whereas the term “Kdis” or “Kd,” as used herein, is intended to refer to the dissociation rate of a particular antibody-antigen interaction. The term “K_{D}”, as used herein, is intended to refer to the dissociation constant, which is obtained from the ratio of Kd to Ka (i.e., Kd/Ka) and is expressed as a molar concentration (M). K_{D} values for antibodies can be determined using methods well established in the art. In some embodiments, the method for determining the K_{D} of an antibody is by using surface plasmon resonance, for example, by using a biosensor system such as a BIACORE® system. In some embodiments, the K_{D} of an antibody is determined by Bio-Layer Interferometry. In some embodiments, the K_{D} is measured using flow cytometry with antigen-expressing cells. In some embodiments, the K_{D} value is measured with the antigen immobilized. In other embodiments, the K_{D} value is measured with the antibody (e.g., parent mouse antibody, chimeric antibody, or humanized antibody variants) immobilized. In certaIn some embodiments, the K_{D} value is measured in a bivalent binding mode. In other embodiments, the K_{D} value is measured in a monovalent binding mode. Specific binding for a particular antigen or an epitope can be exhibited, for example, by an antibody having a K_{D} for an antigen or epitope of at least about 10⁻⁷ M, at least about 10⁻⁸ M, at least about 10⁻⁹ M, at least about 10⁻¹⁰ M, at least about 10⁻¹¹ M, at least about 10⁻¹² M, at least about 10⁻¹³ M, or at least about 10⁻¹⁴ M. Typically, an antibody that specifically binds an antigen will have a K_{D} that is 20-, 50-, 100-, 500-, 1000-, 5,000-, 10,000- or more times greater for a control molecule relative to the antigen or epitope.

[0124] “Percent (%) amino acid sequence identity” with respect to a protein sequence is defined as the percentage of amino acid residues in a candidate sequence that are identical with the amino acid residues in the specific (parental) sequence, after aligning the sequences and introducing gaps, if necessary, to achieve the maximum percent sequence identity, and not considering any conservative substitutions as part of the sequence identity. Alignment for purposes of determining percent amino acid sequence identity can be achieved in various ways that are within the skill in the art, for instance, using publicly available computer software such as BLAST, BLAST-2, ALIGN or Megalign (DNASTAR) software. Those skilled in the art can determine appropriate parameters for measuring alignment, including any algorithms needed to achieve maximal alignment over the full length of the sequences being compared. One particular program is the ALIGN-2 program outlined at paragraphs [0279] to [0280] of US Pub. No. 20160244525, hereby incorporated by reference. Another approximate alignment for nucleic acid sequences is provided by the local homology algorithm of Smith and Waterman, Advances in Applied Mathematics, 2:482-489 (1981). This algorithm can be applied to amino acid sequences by using the scoring matrix developed by Dayhoff, Atlas of Protein Sequences and Structure, M. O. Dayhoff ed., 5 suppl. 3:353-358, National Biomedical Research Foundation, Washington, D.C., USA, and normalized by Gribskov, Nucl. Acids Res. 14(6):6745-6763 (1986).

[0125] An example of an implementation of an algorithm to determine percent identity of a sequence is provided by the Genetics Computer Group (Madison, WI) in the “BestFit” utility application. The default parameters for this method are described in the Wisconsin Sequence Analysis Package Program Manual, Version 8 (1995) (available from Genetics Computer Group, Madison, WI). Another method of establishing percent identity in the context of the present invention is to use the MPSRCH package of programs copyrighted by the University of Edinburgh, developed by John F. Collins and Shane S. Sturrok, and distributed by IntelliGenetics, Inc. (Mountain View, CA). From this suite of packages, the Smith-Waterman algorithm can be employed where default parameters are used for the scoring table (for example, gap open penalty of 12, gap extension penalty of one, and a gap of six). From the data generated the “Match” value reflects “sequence identity.” Other suitable programs for calculating the percent identity or similarity between sequences are generally known in the art, for example, another alignment program is BLAST, used with default parameters. For example, BLASTN and BLASTP can be used using the following default parameters: genetic code=standard; filter=none; strand=both; cutoff=60; expect=10; Matrix=BLOSUM62; Descriptions=50 sequences; sort by=HIGH SCORE; Databases=non-redundant, GenBank+EMBL+DDBJ+PDB+GenBank CDS translations+Swiss protein+Spupdate+PIR. Details of these programs can be found at the internet address located by placing http://in front of blast.ncbi.nlm.nih.gov/Blast.cgi.

[0126] The degree of identity between an amino acid sequence of the present invention (“invention sequence”) and the parental amino acid sequence is calculated as the number of exact matches in an alignment of the two sequences, divided by the length of the “invention sequence,” or the length of the parental sequence, whichever is the shortest. The result is expressed in percent identity.

[0127] The terms “treatment”, “treating”, “treat”, and the like, refer to obtaining a desired pharmacologic and/or physiologic effect. The effect may be prophylactic in terms of completely or partially preventing a disease or symptom thereof or reducing the likelihood of a disease or symptom thereof and/or may be therapeutic in terms of a partial or complete cure for a disease and/or adverse effect attributable to the disease. “Treatment”, as used herein, covers any treatment of a disease in a mammal, particularly in a human, and includes: (a) preventing the disease from occurring in a subject which may be predisposed to the disease but has not yet been diagnosed as having it; (b) inhibiting the disease, e.g., arresting its development or progression; and (c) relieving the disease, e.g., causing regression of the disease and/or relieving one or more disease symptoms. “Treatment” is also meant to encompass delivery of an agent in order to provide for a pharmacologic effect, even in the absence of a disease or condition. For example, “treatment” encompasses delivery of a composition that can elicit an immune response or confer immunity in the absence of a disease condition, e.g., in the case of a vaccine.

[0128] An “effective amount” or “therapeutically effective amount” of a composition includes that amount of the composition which is sufficient to provide a beneficial effect to the subject to which the composition is administered. An “effective amount” of a delivery vehicle includes that amount sufficient to effectively bind or deliver a composition.

[0129] The term “nucleic acid” includes RNA or DNA molecules having more than one nucleotide in any form including single-stranded, double-stranded, oligonucleotide or polynucleotide. The term “nucleotide sequence” includes the ordering of nucleotides in an oligonucleotide or polynucleotide in a single-stranded form of nucleic acid.

[0130] A “vector” is capable of transferring gene sequences to a target cell. Typically, “vector construct,” “expression vector,” and “gene transfer vector,” mean any nucleic acid construct capable of directing the expression of a gene of interest and which can transfer a gene sequence to a target cell, which can be accomplished by genomic integration of all or a portion of the vector, or transient or inheritable maintenance of the vector as an extrachromosomal element. Thus, the term includes cloning, and expression vehicles, as well as integrating vectors.

### C. T-Cell Ligand Induced Transient Engager Compositions

[0131] Accordingly, in some aspects, the present invention provides T-cell Ligand Induced Transient Engager (T-LITE™) compositions that can take on three different formats (Format 1 is depicted in FIGS. 1A-1D, Format 2 is depicted in FIG. 2, and Format 3 is generally depicted in FIG. 3. Each format relies on the use of multiple protein domains that together form fusion proteins that interact in pairs along with indinavir to form active T cell engaging complexes as more fully described below.

1. Indinavir Chemically Induced Dimerization (iCID) Domains

[0132] Chemically induced dimerization is a biological mechanism in which two proteins non-covalently associate or bind only in the presence of a dimerizing agent. In the present invention, the two proteins are referred to as indinavir Chemically Induced Dimerization (iCID) domains, and the dimerizing agent is referred to as a “Chemically Induced Dimerization small molecule” or a “CID small molecule” or “CIDSM” or “indinavir”.

[0133] In the present invention, iCID domains come in pairs that will associate in the presence of indinavir. In the present invention, the iCID pairs are made up of two different iCID domains that are brought together by indinavir: one iCID is an indinavir binding domain that binds indinavir, and the second iCID is an indinavir-complex binding domain, wherein the second iCID only binds to the first iCID when it is complexed with indinavir.

a. Indinavir Binding Domains as iCIDs

[0134] As discussed herein, one of the iCID pair is an indinavir binding domain, which are generally antigen binding domains (ABDs) that bind indinavir. In some embodiments, the indinavir binding domain is a Fab. In many embodiments, the indinavir binding domain is a scFv that binds indinavir. In some embodiments, the iCID pair comprises an indinavir binding domain comprising: a) a variable heavy (VH) domain comprising a vhCDR1, vhCDR2, and vhCDR3 sequence; b) a variable light (VL) domain comprising a vlCDR1, vlCDR2, and vlCDR3 sequence. In some embodiments, the iCID is an scFv comprising an indinavir binding domain comprising: a) a variable heavy (VH) domain comprising a vhCDR1, vhCDR2, and vhCDR3 sequence; b) a variable light (VL) domain comprising a vlCDR1, vlCDR2, and vlCDR3 sequence. In one aspect, a composition of the present disclosure comprises of an indinavir binding domain comprising: a) a variable heavy (VH) domain comprising a vhCDR1, vhCDR2, and vhCDR3 sequence; b) an optional variable light (VL) domain comprising a vlCDR1, vlCDR2, and vlCDR3 sequence. In another aspect, the composition comprises b) the variable light (VL) domain comprising a vlCDR1, vlCDR2, and vlCDR3 sequence.

[0135] In some embodiments, the vhCDR1, vhCDR2 and vhCDR3 sequences and said vlCDR1, vlCDR2, and vlCDR3 sequences may be selected from the group consisting of the vhCDR1, vhCDR2 and vhCDR3 sequences and the vlCDR1, vlCDR2, and vlCDR3 sequences from FIGS. 5A-5E optionally with one or more mutations. In some embodiments, the vhCDR1, vhCDR2 and vhCDR3 sequences and said vlCDR1, vlCDR2, and vlCDR3 sequences may be selected from the group consisting of the vhCDR1, vhCDR2 and vhCDR3 sequences and the vlCDR1, vlCDR2, and vlCDR3 sequences from FIGS. 5A-5E optionally with one or more mutations at positions corresponding to one or more of positions 12, 23, 31, 33, 35, 51, 52, 53, 54, 55, 56, 57, 68, 97, 98, 99, 100, 102 in a heavy chain (HC) domain and positions 32, 34, 91, 92, 93, 94 and 97 in a light chain (LC) domain of Ab1094. In some embodiments, the vhCDR1, vhCDR2 and vhCDR3 sequences and said vlCDR1, vlCDR2, and vlCDR3 sequences may be selected from the group consisting of the vhCDR1, vhCDR2 and vhCDR3 sequences and the vlCDR1, vlCDR2, and vlCDR3 sequences from FIGS. 5A-5E. In some embodiments, the vhCDR1, vhCDR2 and vhCDR3 sequences and said vlCDR1, vlCDR2, and vlCDR3 sequences have said one, two, three, four, five, fix or seven mutations described herein.

[0136] In some embodiments, the vhCDR1, vhCDR2 and vhCDR3 sequences and said vlCDR1, vlCDR2, and vlCDR3 sequences may be selected from the group consisting of the vhCDR1, vhCDR2 and vhCDR3 sequences and the vlCDR1, vlCDR2, and vlCDR3 sequences from Ab0220, Ab0617, Ab0618, Ab0658, Ab0660, Ab0661, Ab0662, Ab0663, Ab0666, Ab0667, Ab0726, Ab0727, Ab0728, Ab0729, Ab0730, Ab0731, Ab0732, Ab0733, Ab0734, Ab0735, Ab0736, Ab0738, Ab0739, Ab0740, Ab0741, Ab0742, Ab0745, Ab0746, Ab0747, Ab0748, Ab0749, Ab0750, Ab0751, Ab0753, Ab0755, Ab0756, Ab0757, Ab0758, Ab0759, Ab0760, Ab0761, Ab0762, Ab0763, Ab0785, Ab0786, Ab0787, Ab0788, Ab0898, Ab0899, Ab0900, Ab1094, Ab1095, Ab1096, Ab1097, Ab1098, Ab1099, Ab1102, Ab1103 Ab1104, Ab1105, Ab1106, Ab1107, Ab1108, Ab1109, Ab1110, Ab1111, Ab1114, Ab1115, Ab1117, Ab1118, Ab120, Ab121, Ab1123, Ab1124, Ab1126, Ab1128, Ab1129, Ab1130, Ab1131, and Ab1132 from FIGS. 5A-5E. In some embodiments, the sequences are from Ab0220. In some embodiments, the sequences are from Ab0617. In some embodiments, the sequences are from Ab0618. In some embodiments, the sequences are from Ab0658. In some embodiments, the sequences are from Ab0660. In some embodiments, the sequences are from Ab0661. In some embodiments, the sequences are from Ab0662. In some embodiments, the sequences are from Ab0663. In some embodiments, the sequences are from Ab0666. In some embodiments, the sequences are from Ab0667. In some embodiments, the sequences are from Ab0726. In some embodiments, the sequences are from Ab0727. In some embodiments, the sequences are from Ab0728. In some embodiments, the sequences are from Ab0729. In some embodiments, the sequences are from Ab0730. In some embodiments, the sequences are from Ab0731. In some embodiments, the sequences are from Ab0732. In some embodiments, the sequences are from Ab0733. In some embodiments, the sequences are from Ab0734. In some embodiments, the sequences are from Ab0735. In some embodiments, the sequences are from Ab0736. In some embodiments, the sequences are from Ab0738. In some embodiments, the sequences are from Ab0739. In some embodiments, the sequences are from Ab0740. In some embodiments, the sequences are from Ab0741. In some embodiments, the sequences are from Ab0742. In some embodiments, the sequences are from Ab0745. In some embodiments, the sequences are from Ab0746. In some embodiments, the sequences are from Ab0747. In some embodiments, the sequences are from Ab0748. In some embodiments, the sequences are from Ab0749. In some embodiments, the sequences are from Ab0750. In some embodiments, the sequences are from Ab0751. In some embodiments, the sequences are from Ab0753. In some embodiments, the sequences are from Ab0755. In some embodiments, the sequences are from Ab0756. In some embodiments, the sequences are from Ab0757. In some embodiments, the sequences are from Ab0758. In some embodiments, the sequences are from Ab0759. In some embodiments, the sequences are from Ab0760. In some embodiments, the sequences are from Ab0761. In some embodiments, the sequences are from Ab0762. In some embodiments, the sequences are from Ab0763. In some embodiments, the sequences are from Ab0785. In some embodiments, the sequences are from Ab0786. In some embodiments, the sequences are from Ab0787. In some embodiments, the sequences are from Ab0788. In some embodiments, the sequences are from Ab0898. In some embodiments, the sequences are from Ab0899. In some embodiments, the sequences are from Ab0900. In some embodiments, the sequences are from Ab1094. In some embodiments, the sequences are from Ab1095. In some embodiments, the sequences are from Ab1096. In some embodiments, the sequences are from Ab1097. In some embodiments, the sequences are from Ab1098. In some embodiments, the sequences are from Ab1099. In some embodiments, the sequences are from Ab1102. In some embodiments, the sequences are from Ab1103. In some embodiments, the sequences are from Ab1104. In some embodiments, the sequences are from Ab1105. In some embodiments, the sequences are from Ab1106. In some embodiments, the sequences are from Ab1107. In some embodiments, the sequences are from Ab1108. In some embodiments, the sequences are from Ab1109. In some embodiments, the sequences are from Ab1110. In some embodiments, the sequences are from Ab1111. In some embodiments, the sequences are from Ab1114. In some embodiments, the sequences are from Ab1115. In some embodiments, the sequences are from Ab1117. In some embodiments, the sequences are from Ab1118. In some embodiments, the sequences are from Ab1120. In some embodiments, the sequences are from Ab1121. In some embodiments, the sequences are from Ab1123. In some embodiments, the sequences are from Ab1124. In some embodiments, the sequences are from Ab1126. In some embodiments, the sequences are from Ab1128. In some embodiments, the sequences are from Ab1129. In some embodiments, the sequences are from Ab1130. In some embodiments, the sequences are from Ab1131. In some embodiments, the sequences are from Ab1132.

[0137] In some embodiments, the vhCDR1, vhCDR2 and vhCDR3 sequences and said vlCDR1, vlCDR2, and vlCDR3 sequences may be selected from the group consisting of the vhCDR1, vhCDR2 and vhCDR3 sequences and the vlCDR1, vlCDR2, and vlCDR3 sequences from the Ab1094 optionally with one or more mutations at positions corresponding to one or more of positions 12, 23, 31, 33, 35, 51, 52, 53, 54, 55, 56, 57, 68, 97, 98, 99, 100, 102 in a heavy chain (HC) domain and positions 32, 34, 91, 92, 93, 94 and 97 in a light chain (LC) domain. In some embodiments, one or more of the vhCDR1, vhCDR2 and vhCDR3 sequences and the vlCDR1, vlCDR2, and vlCDR3 sequences may be selected from the group consisting of the vhCDR1, vhCDR2 and vhCDR3 sequences and the vlCDR1, vlCDR2, and vlCDR3 sequences from the Ab1094.

[0138] In some embodiments, the indinavir binding domain may comprise a VH domain and VL domain selected from the group consisting of the VH and VL domains from FIGS. 5A-5E optionally with one or more mutations. In some embodiments, the indinavir binding domain may comprise a VH domain and VL domain selected from the group consisting of the VH and VL domains from Figures SA-SE. In some embodiments, the indinavir binding domain may comprise a sequence having at least 85%, 86%, 87%, 88%, 89%, 90%, 91%, 92%, 93%, 94%, 95%, 96%, 97%, 98%, 99%, 100% sequence identity with the VH domain sequence of the Ab1094 and/or a sequence having at least 85%, 86%, 87%, 88%, 89%, 90%, 91%, 92%, 93%, 94%, 95%, 96%, 97%, 98%, 99%, 100% sequence identity with the VL domain sequence of the Ab1094. In some embodiments, the indinavir binding domain may comprise the VH and VL domain sequences of the Ab1094. In some embodiments, the indinavir binding domain may comprise the Ab1094.

[0139] In some embodiments, the vhCDR1, vhCDR2 and vhCDR3 sequences and said vlCDR1, vlCDR2, and vlCDR3 sequences may comprise one or more mutations selected from the group consisting of mutations corresponding to HC G44C+LC Q100C, LC Y94D, LC L95A, LC L95D, LC L95K, LC L95Q, HC T73K, and HC V78A of the Ab0220. In some embodiments, the vhCDR1, vhCDR2 and vhCDR3 sequences and said vlCDR1, vlCDR2, and vlCDR3 sequences may comprise one or more mutations selected from the group consisting of mutations corresponding to HC R71V+LC L95Q, HC M48I+V67A+M69L+R71V+T73K and LCL95Q, HC A40R+LC L95Q, LC A43H+L95Q, and HC G44R+LC L95Q of the Ab0220. In some embodiments, the vhCDR1, vhCDR2 and vhCDR3 sequences and said vlCDR1, vlCDR2, and vlCDR3 sequences may comprise one or more mutations selected from the group consisting of mutations corresponding to I50M+S58N, 150M, and S58N in the HC domain of the Ab00785. In some embodiments, the vhCDR1, vhCDR2 and vhCDR3 sequences and said vlCDR1, vlCDR2, and vlCDR3 sequences may comprise one or more mutations selected from the group consisting of mutations corresponding to I50M+S58N and 150M in the HC domain of the Ab0898. In some embodiments, the vhCDR1, vhCDR2 and vhCDR3 sequences and said vlCDR1, vlCDR2, and vlCDR3 sequences may comprise one or more mutations selected from the group consisting of mutations corresponding to W33A, W33F, W33H, W33L, H35A, H52N, H52A, R100A, N53A, N53S, N53Q, S54A, I51A, G55A, G56S, T57A, Y8G95A, Y97A, V98A, S99A, Y102A, S31A, K12Q, K23I, and T68Q in the heavy chain (HC) domain and Y91A, Y94A, S92A, G93A, 197A, H34A, and Y32A in the light chain (LC) domain of Ab1094. In some embodiments, the sequences have a mutation corresponding to said W33A. In some embodiments, the sequences have a mutation corresponding to said W33F. In some embodiments, the sequences have a mutation corresponding to said W33H. In some embodiments, the sequences have a mutation corresponding to said W33L. In some embodiments, the sequences have a mutation corresponding to said H35A. In some embodiments, the sequences have a mutation corresponding to said H52N. In some embodiments, the sequences have a mutation corresponding to said H52A. In some embodiments, the sequences have a mutation corresponding to said R100A. In some embodiments, the sequences have a mutation corresponding to said N53A. In some embodiments, the sequences have a mutation corresponding to said N53S. In some embodiments, the sequences have a mutation corresponding to said N53Q. In some embodiments, the sequences have a mutation corresponding to said S54A. In some embodiments, the sequences have a mutation corresponding to said I51A. In some embodiments, the sequences have a mutation corresponding to said G55A. In some embodiments, the sequences have a mutation corresponding to said G56S. In some embodiments, the sequences have a mutation corresponding to said T57A. In some embodiments, the sequences have a mutation corresponding to said Y8G95A. In some embodiments, the sequences have a mutation corresponding to said Y97A. In some embodiments, the sequences have a mutation corresponding to said V98A. In some embodiments, the sequences have a mutation corresponding to said S99A. In some embodiments, the sequences have a mutation corresponding to said Y102A. In some embodiments, the sequences have a mutation corresponding to said S31A. In some embodiments, the sequences have a mutation corresponding to said K12Q. In some embodiments, the sequences have a mutation corresponding to said K23I. In some embodiments, the sequences have a mutation corresponding to said T68Q. In some embodiments, the sequences have a mutation corresponding to said Y91A. In some embodiments, the sequences have a mutation corresponding to said Y94A. In some embodiments, the sequences have a mutation corresponding to said S92A. In some embodiments, the sequences have a mutation corresponding to said G93A. In some embodiments, the sequences have a mutation corresponding to said T97A. In some embodiments, the sequences have a mutation corresponding to said H34A. In some embodiments, the sequences have a mutation corresponding to said Y32A.

[0140] In some embodiments, the composition may be a fusion protein.

[0141] In some embodiments, said composition comprises an Fc domain with one or more knob variants. In some embodiments, said composition comprises an Fc domain with one or more hole variants. Some examples of the knob and hole Fc sequences are disclosed in FIG. 10. In some embodiments, the Fc domain described herein having a knob variant comprises a sequence having at least 85, 86, 87, 88, 89, 90, 91, 92, 93, 94, 95, 96, 97, 98, 99 and 100% identity to any one of SEQ ID NO: 3235, 3237, 3239, 3241, and 3243. In some embodiments, the Fc domain described herein having a hole variant comprises a sequence having at least 85, 86, 87, 88, 89, 90, 91, 92, 93, 94, 95, 96, 97, 98, 99 and 100% identity to any one of SEQ ID NO: 3236, 3238, 3240, 3242, and 3244. In some embodiments, the Fc domain described herein having a knob variant comprises the sequence of 3235. In some embodiments, the Fc domain described herein having a knob variant comprises the sequence of 3237. In some embodiments, the Fc domain described herein having a knob variant comprises the sequence of 3239. In some embodiments, the Fc domain described herein having a knob variant comprises the sequence of 3241. In some embodiments, the Fc domain described herein having a knob variant comprises the sequence of 3243. In some embodiments, the Fc domain described herein having a hole variant comprises the sequence of SEQ ID NO: 3236. In some embodiments, the Fc domain described herein having a hole variant comprises the sequence of SEQ ID NO: 3238. In some embodiments, the Fc domain described herein having a hole variant comprises the sequence of SEQ ID NO: 3240. In some embodiments, the Fc domain described herein having a hole variant comprises the sequence of SEQ ID NO: 3242. In some embodiments, the Fc domain described herein having a hole variant comprises the sequence of SEQ ID NO: 3244.

[0142] In some embodiments, the indinavir binding domain may comprise scFv means for binding indinavir. In some embodiments, the indinavir binding domain may comprise Fab means for binding indinavir.

[0143] In some embodiments, the composition may be a nucleic acid composition comprising a polynucleotide encoding a composition comprising an indinavir binding domain. In some embodiments, an expression vector composition comprising the nucleic acid composition. In some embodiments, a host cell may comprise the expression vector.

[0144] In some embodiments, the method of making the composition of the present disclosure may comprise an immunization campaign, validation of murine indinavir binders, humanization of the murine indinavir binders, generation of the composition and validation of the composition.

[0145] In another aspect, the present disclosure relates to a composition comprising an indinavir binding domain comprising: a) a variable heavy (VH) domain comprising a vhCDR1, vhCDR2, and vhCDR3 sequence; b) a variable light (VL) domain comprising a vlCDR1, vlCDR2, and vlCDR3 sequence; wherein said vhCDR1, vhCDR2 and vhCDR3 sequences and said vlCDR1, vlCDR2, and vlCDR3 sequences are selected from the group consisting of the vhCDR1, vhCDR2 and vhCDR3 sequences and the vlCDR1, vlCDR2, and vlCDR3 sequences from P7-F7, P7-E7, P5-H5, P2-D8, P3-E12, P6-C8, P7-G8, P6-D7, P6-D5, P3-A11, P5-C3, P3-H5, P7-H10, P7-C6, P2-C2, P2-E8, P5-E9, P3-H7, P7-D6, P6-D11, P5-A9, P4-C5, P3-H2, P1-H3, P1-B12, P4-G12, P2-A10, P4-D11, P7-D12, P1-C11, P4-F9, P6-H5, P2-D7, P3-F5, P3-C5, P8-F4, P8-C2, P7-F12, P2-H7, P1-B7, P2-D9, P6-E8, P3-B9, P1-G1, P1-D11, P8-E3, P4-E4, P5-D12, P3-F4, P6-H2, P1-E9, P8-D9, and P4-G11 (FIG. 49). In another aspect, the present disclosure relates to a composition according to claim A1 wherein said indinavir binding domain comprises a VH domain and VL domain selected from the group consisting of the VH and VL domains of P7-F7, P7-E7, P5-H5, P2-D8, P3-E12, P6-C8, P7-G8, P6-D7, P6-D5, P3-A11, P5-C3, P3-H5, P7-H10, P7-C6, P2-C2, P2-E8, P5-E9, P3-H7, P7-D6, P6-D11, P5-A9, P4-C5, P3-H2, P1-H3, P1-B12, P4-G12, P2-A10, P4-D11, P7-D12, P1-C11, P4-F9, P6-H5, P2-D7, P3-F5, P3-C5, P8-F4, P8-C2, P7-F12, P2-H7, P1-B7, P2-D9, P6-E8, P3-B9, P1-G1, P1-D11, P8-E3, P4-E4, P5-D12, P3-F4, P6-H2, P1-E9, P8-D9, and P4-G11 (FIG. 49). In some embodiments, said composition is a fusion protein. In some embodiments, the composition comprises an indinavir binding domain comprising scFv means for binding indinavir. In some embodiments, the composition comprises an indinavir binding domain comprising Fab means for binding indinavir. In some embodiments, the present disclosure relates to a nucleic acid composition comprising a polynucleotide encoding said composition herein. In some embodiments, the present disclosure relates to an expression vector composition comprising the nucleic acid composition herein. In some embodiments, the present disclosure relates to a host cell comprising the expression vector composition herein. In some embodiments, the present disclosure relates to a method of making the composition herein, the method comprising: an immunization campaign, validation of murine indinavir binders, humanization of the murine indinavir binders, generation of the composition herein, and validation of the composition herein.

b. Indinavir-Complex Binding Domains

[0146] As discussed herein, one of the iCID pair is an indinavir-complex binding domain, which are generally ABDs that bind the complex of the first iCID when complexed with indinavir. In some embodiments, the indinavir-complex binding domain comprises an indinavir-complex binding domain comprising: a) a variable heavy (VH) domain comprising a vhCDR1, vhCDR2, and vhCDR3 sequence; b) a variable light (VL) domain comprising a vlCDR1, vlCDR2, and vlCDR3 sequence. In some embodiments, the iCID is an scFv comprises an indinavir-complex binding domain comprising: a) a variable heavy (VH) domain comprising a vhCDR1, vhCDR2, and vhCDR3 sequence; b) a variable light (VL) domain comprising a vlCDR1, vlCDR2, and vlCDR3 sequence. In one aspect, the composition of the present disclosure comprises of an indinavir-complex binding domain comprising: a) a variable heavy (VH) domain comprising a vhCDR1, vhCDR2, and vhCDR3 sequence; b) a variable light (VL) domain comprising a vlCDR1, vlCDR2, and vlCDR3 sequence.

[0147] In some embodiments, the vhCDR1, vhCDR2 and vhCDR3 sequences and said vlCDR1, vlCDR2, and vlCDR3 sequences may be selected from the group consisting of the vhCDR1, vhCDR2 and vhCDR3 sequences and the vlCDR1, vlCDR2, and vlCDR3 sequences from FIGS. 6A-6G optionally with one or more mutations. In some embodiments, the vhCDR1, vhCDR2 and vhCDR3 sequences and said vlCDR1, vlCDR2, and vlCDR3 sequences may be selected from the group consisting of the vhCDR1, vhCDR2 and vhCDR3 sequences and the vlCDR1, vlCDR2, and vlCDR3 sequences from FIGS. 6A-6G optionally with one or more mutations selected from group consisting of mutations corresponding to one or more positions 50, 58, 95, 98 and 100 in the heavy chain domain of Ab1091 of FIGS. 6A-6G. In some embodiments, the vhCDR1, vhCDR2 and vhCDR3 sequences and said vlCDR1, vlCDR2, and vlCDR3 sequences may be selected from the group consisting of the vhCDR1, vhCDR2 and vhCDR3 sequences and the vlCDR1, vlCDR2, and vlCDR3 sequences from FIGS. 6A-6G.

[0148] In some embodiments, the vhCDR1, vhCDR2 and vhCDR3 sequences and said vlCDR1, vlCDR2, and vlCDR3 sequences may be selected from the group consisting of the vhCDR1, vhCDR2 and vhCDR3 sequences and the vlCDR1, vlCDR2, and vlCDR3 sequences from Ab0272, Ab0388, Ab0389, Ab0390, Ab0391, Ab0392, Ab0393, Ab0394, Ab0395, Ab0396, Ab0397, Ab0398, Ab0399, Ab0400, Ab0401, Ab0402, Ab0403, Ab0404, Ab0405, Ab0406, Ab0407, Ab0408, Ab0409, Ab0410, Ab0411, Ab0412, Ab0413, Ab0414, Ab0443, Ab0445, Ab0446, Ab0450, Ab0452, Ab0459, Ab0468, Ab0471, Ab0472, Ab0595, Ab0596, Ab0597, Ab0600, Ab0601, Ab0602, Ab0603, Ab0604, Ab0608, Ab0609, Ab0610, Ab0611, Ab0612, Ab0635, Ab0636, Ab0637, Ab0638, Ab0687, Ab0688, Ab0689, Ab0690, Ab0692, Ab0698, Ab0699, Ab0706, Ab0707, Ab0708, Ab0709, Ab0710, Ab0901, Ab0902, Ab0903, Ab0654, Ab0936, Ab0937, Ab0939, Ab0941, Ab0944, Ab0946, Ab0947, Ab0953, Ab0956, Ab0957, Ab0958, Ab1034, Ab1037, Ab1044, Ab1045, Ab1047, Ab1051, Ab1091 of FIGS. 6A-6G. In some embodiments, the sequences are from Ab0272. In some embodiments, the sequences are from Ab0388. In some embodiments, the sequences are from Ab0389. In some embodiments, the sequences are from Ab0390. In some embodiments, the sequences are from Ab0391. In some embodiments, the sequences are from Ab0392. In some embodiments, the sequences are from Ab0393. In some embodiments, the sequences are from Ab0394. In some embodiments, the sequences are from Ab0395. In some embodiments, the sequences are from Ab0396. In some embodiments, the sequences are from Ab0397. In some embodiments, the sequences are from Ab0398. In some embodiments, the sequences are from Ab0399. In some embodiments, the sequences are from Ab0400. In some embodiments, the sequences are from Ab0401. In some embodiments, the sequences are from Ab0402. In some embodiments, the sequences are from Ab0403. In some embodiments, the sequences are from Ab0404. In some embodiments, the sequences are from Ab0405. In some embodiments, the sequences are from Ab0406. In some embodiments, the sequences are from Ab0407. In some embodiments, the sequences are from Ab0408. In some embodiments, the sequences are from Ab0409. In some embodiments, the sequences are from Ab0410. In some embodiments, the sequences are from Ab0411. In some embodiments, the sequences are from Ab0412. In some embodiments, the sequences are from Ab0413. In some embodiments, the sequences are from Ab0414. In some embodiments, the sequences are from Ab0443. In some embodiments, the sequences are from Ab0445. In some embodiments, the sequences are from Ab0446. In some embodiments, the sequences are from Ab0450. In some embodiments, the sequences are from Ab0452. In some embodiments, the sequences are from Ab0459. In some embodiments, the sequences are from Ab0468. In some embodiments, the sequences are from Ab0471. In some embodiments, the sequences are from Ab0472. In some embodiments, the sequences are from Ab0595. In some embodiments, the sequences are from Ab0596. In some embodiments, the sequences are from Ab0597. In some embodiments, the sequences are from Ab0600. In some embodiments, the sequences are from Ab0601. In some embodiments, the sequences are from Ab0602. In some embodiments, the sequences are from Ab0603. In some embodiments, the sequences are from Ab0604. In some embodiments, the sequences are from Ab0608. In some embodiments, the sequences are from Ab0609. In some embodiments, the sequences are from Ab0610. In some embodiments, the sequences are from Ab0611. In some embodiments, the sequences are from Ab0612. In some embodiments, the sequences are from Ab0635. In some embodiments, the sequences are from Ab0636. In some embodiments, the sequences are from Ab0637. In some embodiments, the sequences are from Ab0638. In some embodiments, the sequences are from Ab0687. In some embodiments, the sequences are from Ab0688. In some embodiments, the sequences are from Ab0689. In some embodiments, the sequences are from Ab0690. In some embodiments, the sequences are from Ab0692. In some embodiments, the sequences are from Ab0698. In some embodiments, the sequences are from Ab0699. In some embodiments, the sequences are from Ab0706. In some embodiments, the sequences are from Ab0707. In some embodiments, the sequences are from Ab0708. In some embodiments, the sequences are from Ab0709. In some embodiments, the sequences are from Ab0710. In some embodiments, the sequences are from Ab0901. In some embodiments, the sequences are from Ab0902. In some embodiments, the sequences are from Ab0903. In some embodiments, the sequences are from Ab0654. In some embodiments, the sequences are from Ab0936. In some embodiments, the sequences are from Ab0937. In some embodiments, the sequences are from Ab0939. In some embodiments, the sequences are from Ab0941. In some embodiments, the sequences are from Ab0944. In some embodiments, the sequences are from Ab0946. In some embodiments, the sequences are from Ab0947. In some embodiments, the sequences are from Ab0953. In some embodiments, the sequences are from Ab0956. In some embodiments, the sequences are from Ab0957. In some embodiments, the sequences are from Ab0958. In some embodiments, the sequences are from Ab1034. In some embodiments, the sequences are from Ab1037. In some embodiments, the sequences are from Ab1044. In some embodiments, the sequences are from Ab1045. In some embodiments, the sequences are from Ab1047. In some embodiments, the sequences are from Ab1051. In some embodiments, the sequences are from Ab1091.

[0149] In some embodiments, the vhCDR1, vhCDR2 and vhCDR3 sequences and said vlCDR1, vlCDR2, and vlCDR3 sequences may be selected from the group consisting of the vhCDR1, vhCDR2 and vhCDR3 sequences and the vlCDR1, vlCDR2, and vlCDR3 sequences from the Ab1045 optionally with one or more mutations at positions 50, 58, 95, 98 and 100 in the HC domain. In some embodiments, one or more of the vhCDR1, vhCDR2 and vhCDR3 sequences and the vlCDR1, vlCDR2, and vlCDR3 sequences may be selected from the group consisting of the vhCDR1, vhCDR2 and vhCDR3 sequences and the vlCDR1, vlCDR2, and vlCDR3 sequences from the Ab1045.

[0150] In embodiments, the indinavir-complex binding domain may comprise a VH domain and VL domain selected from the group consisting of the VH and VL domains from FIGS. 6A-6G optionally with one or more mutations. In some embodiments, the indinavir-complex binding domain may comprise a VH domain and VL domain selected from the group consisting of the VH and VL domains from FIGS. 6A-6G.

[0151] In some embodiments, the indinavir-complex binding domain may comprise a sequence having at least 85%, 86%, 87%, 88%, 89%, 90%, 91%, 92%, 93%, 94%, 95%, 96%, 97%, 98%, 99%, 100% sequence identity with the VH domain sequence of the Ab1045 and/or a sequence having at least 85%, 86%, 87%, 88%, 89%, 90%, 91%, 92%, 93%, 94%, 95%, 96%, 97%, 98%, 99%, 100% sequence identity with the VL domain sequence of the Ab1045. In some embodiments, the indinavir-complex binding domain may comprise the VH and VL domain sequences of the Ab1045. In some embodiments, the indinavir-complex binding domain may comprise the Ab1045.

[0152] In some embodiments, the vhCDR1, vhCDR2 and vhCDR3 sequences and said vlCDR1, vlCDR2, and vlCDR3 sequences may comprise one, two, three, four, five or more mutations selected from the group consisting of mutations corresponding to Y53S, Y53A, Y54S, Y54A, Y58S, Y58A, Y95S, Y95A, Y96S, Y96A, W98S, W98A, Y99S, Y99A, Y100aS, Y100aA, Y100bS, Y100bA, Y100dS, Y100dA, M100eA, M100eL, Y100gS, Y100gA, M100hA, M100hL, F100jA, M100hL, and S30A in the HC domain of Ab0272. In some embodiments, the vhCDR1, vhCDR2 and vhCDR3 sequences and said vlCDR1, vlCDR2, and vlCDR3 sequences may comprise Y96A+Y100gS, Y100bS+Y100gS, Y100dA+Y100gS, Y53A+Y100gS, Y96A+Y100bS+Y100gS, Y53A+Y100bS+Y100gS, Y95A+Y96A, Y100gS+M100hL, or S30A in the HC domain of Ab0272. In some embodiments, the vhCDR1, vhCDR2 and vhCDR3 sequences and said vlCDR1, vlCDR2, and vlCDR3 sequences may comprise one, two, three, four, five or more mutations selected from the group consisting of mutations corresponding to S30A, N28D, N28E, N28T, S30K, V29I, S30K, N28T, V29F, S33A, I24M, H35S, W9Y, W98H, M100eL, and M100hL in the HC domain of Ab0445. In some embodiments, the vhCDR1, vhCDR2 and vhCDR3 sequences and said vlCDR1, vlCDR2, and vlCDR3 sequences may comprise one, two, three, four, five or more mutations selected from the group consisting of mutations corresponding to V29I+S30K, N28T+V29F, N28T+V29F+S33A+I34M+H35S or M100eL+M100hL in the HC domain of Ab0445. In some embodiments, the vhCDR1, vhCDR2 and vhCDR3 sequences and said vlCDR1, vlCDR2, and vlCDR3 sequences may comprise one, two, three or four mutations selected from the group consisting of mutations corresponding to N28D, V29F, M100eL, and M100hL in the HC domain of Ab0596. In some embodiments, the vhCDR1, vhCDR2 and vhCDR3 sequences and said vlCDR1, vlCDR2, and vlCDR3 sequences may comprise one, two, three or four mutations selected from the group consisting of mutations corresponding to V29F+M100eL+M100hL in the HC domain of Ab0596. In some embodiments, the vhCDR1, vhCDR2 and vhCDR3 sequences and said vlCDR1, vlCDR2, and vlCDR3 sequences may comprise one, two, three or four mutations selected from the group consisting of mutations corresponding to M100eA, Y53N, Y53D, Y53H, Y53S, S100bD, S100bK, Y100dN, Y100dD, YS100bK, Y100dN, Y100dD, Y100dH, Y100dK, and Y100dS in the HC domain of Ab00637. In some embodiments, the vhCDR1, vhCDR2 and vhCDR3 sequences and said vlCDR1, vlCDR2, and vlCDR3 sequences may comprise one, two, three or four mutations selected from the group consisting of mutations corresponding to M100eA, Y53H, S100bD, Y53H+S100bD, S100bD+L100eA, and Y53H+S100bD+L100eA in the HC domain of Ab00637. In some embodiments, the vhCDR1, vhCDR2 and vhCDR3 sequences and said vlCDR1, vlCDR2, and vlCDR3 sequences may comprise one, two, three or four mutations selected from the group consisting of mutations corresponding to S50A, I51A, P52aA, S56A, D100bA, G100iA, D101A, G92A, L95A, I96A, and T97A in the HC domain of Ab00698. In some embodiments, the vhCDR1, vhCDR2 and vhCDR3 sequences and said vlCDR1, vlCDR2, and vlCDR3 sequences may comprise one, two or three mutations selected from the group consisting of mutations corresponding to Y58A, Y95A, Y58A+Y95A, Y58A+G100fS, S50A, S50A+W98Y, and S50A+Y58A+Y95A in the HC domain of Ab0902. In some embodiments, the vhCDR1, vhCDR2 and vhCDR3 sequences and said vlCDR1, vlCDR2, and vlCDR3 sequences may comprise a mutation corresponding to Y58A+G100fS and/or S50A in the HC domain of Ab0903. In some embodiments, the vhCDR1, vhCDR2 and vhCDR3 sequences and said vlCDR1, vlCDR2, and vlCDR3 sequences may comprise one or more mutations selected from the group consisting of mutations corresponding to S50A, Y58A, Y95A, and W98Y in the HC domain of Ab0902. In some embodiments, the sequences have a mutation corresponding to said S50A. In some embodiments, the sequences have mutations corresponding to said S50A and said W98Y. In some embodiments, the sequences have mutations corresponding to said S50A, said Y58A, and Y95A.

[0153] In some embodiments, the composition of the present disclosure may be a fusion protein.

[0154] In some embodiments, the composition may comprise another VH domain and another VL domain. In some embodiments, the composition may comprise two identical VH domains and two identical VL domains.

[0155] In some embodiments, the composition may comprise an indinavir-complex binding domain comprising scFv means for binding a complex of indinavir bound to a scFv. In some embodiments, the composition may comprise an indinavir-complex binding domain comprising Fab means for binding indinavir complex with an indinavir binding domain.

[0156] In some embodiments, said composition comprises an Fc domain with one or more knob variants. In some embodiments, said composition comprises an Fc domain with one or more hole variants. Some examples of the knob and hole Fc sequences are disclosed in FIG. 10. In some embodiments, the Fc domain described herein having a knob variant comprises a sequence having at least 85, 86, 87, 88, 89, 90, 91, 92, 93, 94, 95, 96, 97, 98, 99 and 100% identity to any one of SEQ ID NO: 3235, 3237, 3239, 3241, and 3243. In some embodiments, the Fc domain described herein having a hole variant comprises a sequence having at least 85, 86, 87, 88, 89, 90, 91, 92, 93, 94, 95, 96, 97, 98, 99 and 100% identity to any one of SEQ ID NO: 3236, 3238, 3240, 3242, and 3244. In some embodiments, the Fc domain described herein having a knob variant comprises the sequence of 3235. In some embodiments, the Fc domain described herein having a knob variant comprises the sequence of 3237. In some embodiments, the Fc domain described herein having a knob variant comprises the sequence of 3239. In some embodiments, the Fc domain described herein having a knob variant comprises the sequence of 3241. In some embodiments, the Fc domain described herein having a knob variant comprises the sequence of 3243. In some embodiments, the Fc domain described herein having a hole variant comprises the sequence of SEQ ID NO: 3236. In some embodiments, the Fc domain described herein having a hole variant comprises the sequence of SEQ ID NO: 3238. In some embodiments, the Fc domain described herein having a hole variant comprises the sequence of SEQ ID NO: 3240. In some embodiments, the Fc domain described herein having a hole variant comprises the sequence of SEQ ID NO: 3242. In some embodiments, the Fc domain described herein having a hole variant comprises the sequence of SEQ ID NO: 3244.

[0157] In some embodiments, the composition may be a nucleic acid composition comprising a polynucleotide encoding a composition comprising an indinavir binding domain. In some embodiments, an expression vector composition may comprise the nucleic acid composition. In some embodiments, a host cell may comprise the expression vector.

[0158] In some embodiments, the method of making the composition of the present disclosure may comprise an immunization campaign, validation of murine indinavir binders, humanization of the murine indinavir binders, generation of the composition and validation of the composition.

[0159] For example, in some embodiments, the first CID domain is an indinavir binding domain and the CID small molecule is indinavir. The second CID domain comprises a heavy chain variable domain and light chain variable domain comprising the amino acid sequences of vhCDRs and vlCDRs as shown in FIGS. 6A-6G. The second CID domain binds specifically to the complex formed between the first CID domain and the CID small molecule, but may not bind or only weakly bind to the first CID domain without the CID small molecule and may not bind or only weakly bind to the free CID small molecule.

[0160] In another aspect, the present disclosure relates to a composition comprising an indinavir-complex binding domain comprising: a) a variable heavy (VH) domain comprising a vhCDR1, vhCDR2, and vhCDR3 sequence; b) a variable light (VL) domain comprising a vlCDR1, vlCDR2, and vlCDR3 sequence; wherein said vhCDR1, vhCDR2 and vhCDR3 sequences and said vlCDR1, vlCDR2, and vlCDR3 sequences are selected from the group consisting of the vhCDR1, vhCDR2 and vhCDR3 sequences and the vlCDR1, vlCDR2, and vlCDR3 sequences from Fab001, Fab002, Fab003, Fab004, Fab005, Fab006, Fab007, Fab008, Fab009, Fab0010, Fab0011, Fab0012, Fab0013, Fab0014, Fab0015, Fab0016, Fab0017, Fab0018, Fab0019, Fab0020, Fab0021, and Fab0022 (FIG. 50). In another aspect, the present disclosure relates to a composition according to claim B1 wherein said indinavir-complex binding domain comprises a VH domain and VL domain selected from the group consisting of the VH and VL domains of Fab001, Fab002, Fab003, Fab004, Fab005, Fab006, Fab007, Fab008, Fab009, Fab0010, Fab0011, Fab0012, Fab0013, Fab0014, Fab0015, Fab0016, Fab0017, Fab0018, Fab0019, Fab0020, Fab0021, and Fab0022 (FIG. 50). In some embodiments, said composition is a fusion protein. In some embodiments, the composition comprises an indinavir-complex binding domain comprising scFv means for binding a complex of indinavir bound to a scFv. In some embodiments, the composition comprises an indinavir binding domain comprising Fab means for binding indinavir. In some embodiments, the present disclosure relates to a nucleic acid composition comprising a polynucleotide encoding said composition. In some embodiments, the present disclosure relates to an expression vector composition comprising the nucleic acid composition. In some embodiments, the present disclosure relates to a host cell comprising the expression vector composition. In some embodiments, the present disclosure relates to a method of making the composition, the method comprising: an immunization campaign, validation of murine indinavir binders, humanization of the murine indinavir binders, generation of the composition, and validation of the composition.

[0161] In one aspect, the disclosure provides a composition comprising a first protein having the composition comprising an indinavir binding domain as disclosed herein and a second protein having the composition comprising an indinavir-complex binding domain as disclosed herein.

[0162] In another aspect, the present disclosure relates to a composition comprising: a) a first protein comprising an indinavir binding domain comprising: i) a variable heavy (VH) domain comprising a vhCDR1, vhCDR2, and vhCDR3 sequence; ii) a variable light (VL) domain comprising a vlCDR1, vlCDR2, and vlCDR3 sequence; wherein said vhCDR1, vhCDR2 and vhCDR3 sequences and said vlCDR1, vlCDR2, and vlCDR3 sequences are selected from the group consisting of the vhCDR1, vhCDR2 and vhCDR3 sequences and the vlCDR1, vlCDR2, and vlCDR3 sequences from P7-F7, P7-E7, PS-HS, P2-D8, P3-E12, P6-C8, P7-G8, P6-D7, P6-DS, P3-A11, PS-C3, P3-HS, P7-H10, P7-C6, P2-C2, P2-E8, PS-E9, P3-H7, P7-D6, P6-D11, PS-A9, P4-C5, P3-H2, P1-H3, P1-B12, P4-G12, P2-A10, P4- D11, P7-D12, P1-C11, P4-F9, P6-HS, P2-D7, P3-FS, P3-C5, P8-F4, P8-C2, P7-F12, P2-H7, P1-B7, P2- D9, P6-E8, P3-B9, P1-G1, P1-D11, P8-E3, P4-E4, PS-D12, P3-F4, P6-H2, P1-E9, P8-D9, and P4-G11 (FIG. 49); and b) a second protein comprising an indinavir-complex binding domain comprising: i) a variable heavy (VH) domain comprising a vhCDR1, vhCDR2, and vhCDR3 sequence; ii) a variable light (VL) domain comprising a vlCDR1, vlCDR2, and vlCDR3 sequence; wherein said vhCDR1, vhCDR2 and vhCDR3 sequences and said vlCDR1, vlCDR2, and vlCDR3 sequences are selected from the group consisting of the vhCDR1, vhCDR2 and vhCDR3 sequences and the vlCDR1, vlCDR2, and vlCDR3 sequences from Fab001, Fab002, Fab003, Fab004, Fab005, Fab006, Fab007, Fab008, Fab009, Fab0010, Fab0011, Fab0012, Fab0013, Fab0014, Fab0015, Fab0016, Fab0017, Fab0018, Fab0019, Fab0020, Fab0021, and Fab0022 (FIG. 50). In some embodiments, said indinavir binding domain comprises a VH domain and VL domain selected from the group consisting of the VH and VL domains of P7-F7, P7-E7, PS-HS, P2-D8, P3-E12, P6-C8, P7-G8, P6-D7, P6-DS, P3-A11, PS-C3, P3-HS, P7-H10, P7-C6, P2-C2, P2-E8, PS-E9, P3-H7, P7-D6, P6-D11, PS-A9, P4-C5, P3-H2, P1-H3, P1-B12, P4-G12, P2-A10, P4-D11, P7-D12, P1-C11, P4-F9, P6-HS, P2-D7, P3-FS, P3-C5, P8-F4, P8-C2, P7-F12, P2-H7, P1-B7, P2-D9, P6-E8, P3-B9, P1-G1, P1-D11, P8-E3, P4-E4, PS-D12, P3-F4, P6-H2, P1-E9, P8-D9, and P4- G11 (Figure X) and said indinavir-complex binding domain comprises a VH domain and VL domain selected from the group consisting of the VH and VL domains of Fab001, Fab002, Fab003, Fab004, Fab005, Fab006, Fab007, Fab008, Fab009, Fab0010, Fab0011, Fab0012, Fab0013, Fab0014, Fab0015, Fab0016, Fab0017, Fab0018, Fab0019, Fab0020, Fab0021, and Fab0022 (FIG. 50). In some embodiments, the indinavir binding domain comprises the VH and VL domain of PS-HS. In some embodiments, the indinavir-complex binding domain comprises the VH and VL domain of Fab005.

[0163] In some embodiments, the CID small molecule is indinavir, and the first iCID domain is an indinavir ABD which comprises a heavy chain variable domain and light chain variable domain comprising the amino acid sequences of vh-CDR1, vh-CDR2, vh-CDR3, vl-CDR1, vl-CDR2, and vl-CDR3, respectively, as shown in FIGS. 5A-5E. The second iCID domain comprises an ABD capable of specifically binding to the complex between indinavir and the first iCID domain, and the second iCID domain comprises vhCDRs and vlCDRs as shown in FIGS. 6A-6G.

[0164] In some embodiments, the second half of the iCID comprises an ABD and binds to a site of the complex comprising at least a portion of the small molecule and a portion of the first half of the iCID. In some embodiments, the second half of the iCID comprises an ABD, and binds to a site of the complex of the small molecule and the first half of the iCID, wherein the second half of the iCID binds to the site comprising at least one atom of the small molecule and one atom of the first half of the iCID.

[0165] In some embodiments, the second half of the iCID binds to the complex of the first half of the iCID and the small molecule with a dissociation constant (K_{D}) no more than about 1/250 times (such as no more than about any of 1/300, 1/350, 1/400, 1/450, 1/500, 1/600, 1/700, 1/800, 1/900, 1/1000, 1/1 100, 1/1200, 1/1300, 1/1400, or 1/1500 times, or less) its K_{D} for binding to each of the free small molecule and the free first half of the iCID.

[0166] Binding moieties that specifically bind to a complex between a small molecule and a cognate binding moiety can be produced according to methods known in the art, see, for example, WO2018/213848, hereby incorporated herein by reference in its entirety and specifically for the methods for producing iCID domains. Briefly, a screening is performed from an antibody library, a DARPin library, a nanobody library, or an aptamer library or a phage displayed Fab library. For example, as the step 1, binding moieties can be selected that do not bind to the cognate binding moiety in the absence of the small molecule, thereby generating a set of counter selected binding moieties; and then, as step 2, the counter selected binding moieties can be screened for binding moieties that bind to the complex of the small molecule and the cognate binding moiety, thereby generating a set of positively selected binding moieties. Steps 1 and 2 of screening can be conducted one or more rounds, wherein each round of screening comprises the screening of step 1 and the screening of step 2, such that a set of binding moieties that specifically bind to the complex between the small molecule and the cognate binding moiety is generated. In some embodiments, two or more rounds of screening are performed, wherein the input set of binding moieties of step 1 for the first round of screening is the binding molecule library; the input set of binding moieties of step 2 for each round of screening is the set of counter selected binding moieties of step 1 from the given round of screening; the input set of binding moieties of step 1 for each round of screening following the first round of screening is the set of positively selected binding moieties of step 2 from the previous round of screening; and the set of binding moieties that specifically bind to the complex between the small molecule and the cognate binding moiety is the set of positively selected binding moieties of step 2 for the last round of screening.

[0167] Phage display screening can be done according to previously established protocols (see, Seiler, et al, Nucleic Acids Res., 42:D12531260 (2014). For example, to select antibody binding moieties for the complex of BCL-xL and ABT-737 or, as described herein, for the complex of iCID and indinavir, antibody phage library can be screen against biotinylated iCID captured with streptavidincoated magnetic beads (Promega). Prior to each selection, the phage pool can be incubated with 1 mM of iCID immobilized on streptavidin beads in the absence of indinavir in order to deplete the library of any binders to the apo form of iCID. Subsequently, the beads can be removed and indinavir can be added to the phage pool at a concentration of 1 mM. In total, four rounds of selection can be performed with decreasing amounts of iCID antigen (100 nM, 50 nM, 10 nM and 10 nM). To reduce the deleterious effects of nonspecific binding phage, specific iCID binding Fab-phage can be selectively eluted from the magnetic beads by addition of 2 g/mL TEV protease. Individual phage clones from the fourth round of selection can then be analyzed for sequencing.

### 2. Fc Domains

[0168] In addition to the iCID domains, the pairs of fusion polypeptides that make up the formats of the invention generally comprise an Fc domain.

[0169] As will be appreciated by those in the art, there are generally three types of Fc domains that find use in various embodiments of the present invention, including heterodimeric Fc domains, homodimeric Fc domains and monomeric Fc domains. Additionally, as fully described below, the CC and CT proteins can incorporate any one of the three types of Fc domains, and these can be additionally mixed and matched in the protein complexes. As will be appreciated by those in the art, Fc domains derived from human IgG1 or IgG2, for example, will self-assemble to form dimers (either homodimers or heterodimers as discussed herein), while Fc domains derived from an IgG4 Fc domain are monomeric, and won't self-assemble.

[0170] In addition to the iCID domains, the CC and CTCoS fusion polypeptides generally comprise an Fc domain. As will be appreciated by those in the art, there are generally three types of Fc domains that find use in various embodiments of the present invention, including heterodimeric Fc domains, homodimeric Fc domains and monomeric Fc domains. Additionally, as fully described below, the CC and CTCoS proteins can incorporate any one of the three types of Fc domains, and these can be additionally mixed and matched in the protein complexes. As will be appreciated by those in the art, Fc domains derived from human IgG1 or IgG2, for example, will self-assemble to form dimers (either homodimers or heterodimers as discussed herein), while Fc domains derived from an IgG4 Fc domain are monomeric, and won't self-assemble.

[0171] In addition to the iCID domains, the CC and CTTCoS fusion polypeptides generally comprise an Fc domain. As will be appreciated by those in the art, there are generally three types of Fc domains that find use in various embodiments of the present invention, including heterodimeric Fc domains, homodimeric Fc domains and monomeric Fc domains. Additionally, as fully described below, the CC and CTTCoS proteins can incorporate any one of the three types of Fc domains, and these can be additionally mixed and matched in the protein complexes. As will be appreciated by those in the art, Fc domains derived from human IgG1 or IgG2, for example, will self-assemble to form dimers (either homodimers or heterodimers as discussed herein), while Fc domains derived from an IgG4 Fc domain are monomeric, and won't self-assemble.

[0172] In some embodiments, the Fc domain used has the formula (N- to C-terminal) hinge-CH2-CH3, wherein the hinge is either a full or partial hinge sequence. In some embodiments, the Fc domain used has the formula (N- to C-terminal) CH2-CH3. In some cases, as discussed below, domain linkers can be used to link the Fc domain to the other components.

a. Heterodimeric Fc Variant Domains

[0173] As discussed herein, some embodiments of the invention utilize a CC and CT binding protein that each contains one of a pair of heterodimeric Fc domains. Accordingly, in some embodiments, the invention provides heterodimeric Fc variant domains which include modifications that facilitate the heterodimerization of two Fc domains and/or allow for ease of purification of heterodimers over homodimers, collectively referred to herein as “heterodimerization variants.” As is known in the art, there are a number of mechanisms that can be used to generate heterodimeric Fc domains. Amino acid variants that lead to the production of heterodimeric Fc domains are referred to as “heterodimerization variants”. As discussed below, heterodimerization variants can include steric variants (e.g. the “knobs and holes” variants and the “charge pairs” variants described below) that “skew” the formation of A-B Fc heterodimers over A-A and B-B Fc homodimers. Some examples of the knob and hole Fc sequences described above.

[0174] As discussed herein, some embodiments of the invention utilize a CC and CTCoS binding protein that each contains one of a pair of heterodimeric Fc domains. Accordingly, in some embodiments, the invention provides heterodimeric Fc variant domains which include modifications that facilitate the heterodimerization of two Fc domains and/or allow for ease of purification of heterodimers over homodimers, collectively referred to herein as “heterodimerization variants.” As is known in the art, there are a number of mechanisms that can be used to generate heterodimeric Fc domains. Amino acid variants that lead to the production of heterodimeric Fc domains are referred to as “heterodimerization variants”. As discussed below, heterodimerization variants can include steric variants (e.g. the “knobs and holes” variants and the “charge pairs” variants described below) that “skew” the formation of A-B Fc heterodimers over A-A and B-B Fc homodimers. Some examples of the knob and hole Fc sequences described above.

[0175] As discussed herein, some embodiments of the invention utilize a CC and CTTCoS binding protein that each contains one of a pair of heterodimeric Fc domains. Accordingly, in some embodiments, the invention provides heterodimeric Fc variant domains which include modifications that facilitate the heterodimerization of two Fc domains and/or allow for ease of purification of heterodimers over homodimers, collectively referred to herein as “heterodimerization variants.” As is known in the art, there are a number of mechanisms that can be used to generate heterodimeric Fc domains. Amino acid variants that lead to the production of heterodimeric Fc domains are referred to as “heterodimerization variants”. As discussed below, heterodimerization variants can include steric variants (e.g. the “knobs and holes” variants and the “charge pairs” variants described below) that “skew” the formation of A-B Fc heterodimers over A-A and B-B Fc homodimers.

[0176] One mechanism is generally referred to in the art as “knobs and holes”, or KIH referring to amino acid engineering that creates steric influences to favor heterodimeric formation and disfavor homodimeric formation. That is, one monomer is engineered to have a bulky amino acid (a “knob”) and the other is engineered to reduce the size of the amino acid side chain (a “hole”), that skews the formation of heterodimers over homodimers. These techniques and sequences are described in Ridgway et al., Protein Engineering 9(7):617 (1996); Atwell et al., J. Mol. Biol. 1997 270:26; U.S. Pat. No. 8,216,805, US 2012/0149876, all of which are hereby incorporated by reference in their entirety. The Figures of these references (also specifically incorporated by reference herein for the amino acid variants) identify a number of “monomer A-monomer B” pairs that rely on “knobs and holes”. In addition, as described in Merchant et al., Nature Biotech. 16:677 (1998), these “knobs and hole” mutations can be combined with disulfide bonds to skew formation to heterodimerization.

[0177] An additional mechanism that finds use in the generation of heterodimers is sometimes referred to as “electrostatic steering” or “charge pairs” as described in Gunasekaran et al., J. Biol. Chem. 285(25):19637 (2010), hereby incorporated by reference in its entirety. This is sometimes referred to herein as “charge pairs”. In this embodiment, electrostatics are used to skew the formation towards heterodimerization. As those in the art will appreciate, these may also have an effect on pI, and thus on purification, and thus could in some cases also be considered pI variants. However, as these were generated to force heterodimerization and were not used as purification tools, they are classified as “steric variants”. These include, but are not limited to, D221E/P228E/L368E paired with D221R/P228R/K409R (e.g. these are “monomer corresponding sets) and C220E/P228E/368E paired with C220R/E224R/P228R/K409R.

[0178] Exemplary methods for introducing heterodimerization variants include symmetric-to-asymmetric steric complementarity design, e.g., introducing KiH, HA-TF, and ZW1 mutations [see, Atwell et al., J Mol Biol (1997) 270(1):26-35; Moore et al., MAbs (2011) 3(6):546-57; Von Kreudenstein et al., MAbs (2013) 5(5):646-54, all of which are expressly incorporated herein by reference in their entirety]; charge-to-charge swap (e.g., introducing DD-KK mutations)(see, Gunasekaran et al., J Biol Chem 2010; 285:19637-46 incorporated herein by reference in its entirety); charge-to-steric complementarity swap plus additional long-range electrostatic interactions (e.g., introducing EW-RVT mutations) (Choi et al., Mol Cancer Ther (2013) 12(12):2748-59 incorporated herein by reference in its entirety); and isotype strand swap, e.g., introducing strand-exchange engineered domain (SEED) (Klein et al, MAbs (2012) 4(6):653-63; Von Kreudenstein et al., MAbs (2013) 5(5):646-54, all of which are expressly incorporated herein by reference in their entirety). Exemplary mutations which can be introduced into the Fc domains for inducing heterodimerization are summarized in Table 2.

TABLE 2

| Heterodimeric | Paired mutation - | Paired mutation - |
|---|---|---|
| Fc domain name | one Fc domain | cognate Fc domain |
| KiH | T366W | T366S/L368A/Y407V |
| KiHS-S | T366W/S354C | T366S/L368A/Y407V/ |
| | | Y349C |
| HA-TF | S364H/F405A | Y349T/T394F |
| ZW1 | T350V/L351Y/F405A/ | T350V/T366L/K392L/ |
| | Y407V | T394W |
| 7.8.60 | K360D/D399M/ | E345R/Q347R/T366V/ |
| | Y407A | K409V |
| DD-KK | K409D/K392D | D399K/E356K |
| EW-RVT | K360E/K409W | Q347R/D399V/F405T |
| EW-RVTS-S | K360E/K409W/ | Q347R/D399V/F405T/ |
| | Y349C | S354C |
| SEED | IgA-derived 45 residues | IgG1-derived 57 residues |
| | on IgG1 CH3 | on IgA CH3 |
| A107 | K370E/K409W | E357N/D399V/F405T |

[0179] In some embodiments, KIH mutations are introduced in the Fc domains of IgG1, IgG2, IgG3 or IgG4. Additional exemplary KIH mutations are listed in Table 3, and can be found in U.S. Pat. No. 8,216,805, which is incorporated by reference in its entirety

TABLE 3

| Paired mutation - | Paired mutation - |
|---|---|
| one Fc domain | cognate Fc domain |
| T366Y | Y407T |
| T366W | Y407A |
| F405A | T394W |
| Y407T | T366Y |
| T366Y/F405A | T394W/Y407T |
| T366W/F405W | T394S/Y407A |
| F405W/Y407A | T366W/T394S |
| F405W | T394S |

[0180] In addition to the amino acid substitutions that confer heterodimerization, additional amino acid variations can be introduced into the Fc domain for additional functionality like altered or ablated binding to Fcγ and FcRn receptors, etc., which are described in detail herein.

b. Homodimeric Fc Domains

[0181] Alternatively, some formats of the invention rely on the inclusion of Fc domains that self-assemble to form homodimeric Fc domains. In some embodiments, the Fc domains used for forming a homodimeric Fc fusion protein can be derived from the Fc domains of an IgG, including an IgG1, IgG2, IgG3 or IgG4.

[0182] In some embodiments, the Fc domains are derived from an IgG1, IgG2, IgG3 or IgG4 Fc domain which includes a hinge or partial hinge, a CH2 domain, a CH3 domain. the Fc domains are derived from an IgG1, IgG2, IgG3 or IgG4 Fc domain which includes a CH2 domain and a CH3 domain without a hinge.

[0183] In some embodiments, the amino acid sequence of homodimeric Fc domains is at least 80%, 85%, 90%, or 95% identical to a human IgG1, IgG2, IgG3, or IgG4 Fc domain with or without the hinge.

[0184] The homodimeric Fc domains may also include modifications that affect functionality including, but not limited to, altering binding to one or more Fc receptors (e.g., FcγR and FcRn) as described herein.

[0185] In some embodiments, a human IgG1 Fc domain or variants therein find use in this invention (e.g. IgG1 Fc, see FIG. 10).

[0186] In some embodiments, the Fc domain described herein having a knob variant comprises a sequence having at least 85, 86, 87, 88, 89, 90, 91, 92, 93, 94, 95, 96, 97, 98, 99 and 100% identity to any one of SEQ ID NO: 3235, 3237, 3239, 3241, and 3243. In some embodiments, the Fc domain described herein having a hole variant comprises a sequence having at least 85, 86, 87, 88, 89, 90, 91, 92, 93, 94, 95, 96, 97, 98, 99 and 100% identity to any one of SEQ ID NO: 3236, 3238, 3240, 3242, and 3244. In some embodiments, the Fc domain described herein having a knob variant comprises the sequence of 3235. In some embodiments, the Fc domain described herein having a knob variant comprises the sequence of 3237. In some embodiments, the Fc domain described herein having a knob variant comprises the sequence of 3239. In some embodiments, the Fc domain described herein having a knob variant comprises the sequence of 3241. In some embodiments, the Fc domain described herein having a knob variant comprises the sequence of 3243. In some embodiments, the Fc domain described herein having a hole variant comprises the sequence of SEQ ID NO: 3236. In some embodiments, the Fc domain described herein having a hole variant comprises the sequence of SEQ ID NO: 3238. In some embodiments, the Fc domain described herein having a hole variant comprises the sequence of SEQ ID NO: 3240. In some embodiments, the Fc domain described herein having a hole variant comprises the sequence of SEQ ID NO: 3242. In some embodiments, the Fc domain described herein having a hole variant comprises the sequence of SEQ ID NO: 3244.

c. Monomeric IgG4 Fc Domains

[0187] In some embodiments, the CC and/or CT binding proteins comprises a variant IgG4 Fc domain which inhibits dimer formation of the Fc domains.

[0188] In some embodiments, the CC and/or CTCoS binding proteins comprises a variant IgG4 Fc domain which inhibits dimer formation of the Fc domains.

[0189] In some embodiments, the CC and/or CTTCoS binding proteins comprises a variant IgG4 Fc domain which inhibits dimer formation of the Fc domains.

[0190] One or more amino acid substitutions can be introduced into the Fc domain of human IgG4 to inhibit dimer formation of the Fc domain. These substitutions can be at one or more of the following amino acids according to the Kabat EU numbering system: 349, 351, 354, 356, 357, 364, 366, 368, 370, 392, 394, 399, 405, 407,409, 409 and 439. In some embodiments, the IgG4 Fc domain comprises one or more of the following amino acid substitutions: L351R, L351D, E357R, E357W, S364R, T366R, L368R, T394R, T394D, D399R, F405R, F405Q, Y407R, Y407D, K409W and R409W. In some other embodiments, the IgG4 Fc domain comprises one or more of the following sets of amino acid substitutions: Y349D/S354D, L351DMT394D, L351D/K409R, L351RMT394R, E356R/D399R, D356R/D399R, S364R/L368R, S364W/L368W, S364W/K409R, T366R/Y407R, T366W/L368W, L368R/K409R, T394D/K409R, D399R/K409R, D399R/K439D, F405A/Y407A, F405Q/Y407Q, L351RMT364RMT394R and T366Q/F405Q/Y407Q. In some embodiments, the IgG4 Fc domain comprises L351F, T366R, P395K, F405R and Y407E. In some embodiment, the monomeric IgG4 Fc domain is hingeless, and comprises one or more of the following sets of amino acid substitutions: L351D, L351R, S364R, T366R, L368R, T394D, D399R, F405Q, F405R, Y407R, L351DMT394D, L351DMT394R, S364R/L368R, S364W/L368W, T366R/Y407R, and T366W/L368W. More mutations that stabilize the monomeric IgG4 Fc domain can be found in US Patent Application Publication No. 20130177555, Wilkinson et al., MAbs (2013) 5:606-17, and Shan et al., PLOS ONE|DOI:10.1371/journal.pone.0160345 Aug. 1, 2016, all of which are expressly incorporated herein by reference in their entirety.

[0191] In some embodiments, the monomeric IgG4 Fc domain used in the present invention has the amino acid sequence of IgG4 monomeric Fc, see FIG. 10.

[0192] In some embodiments, the Fc domain described herein having a knob variant comprises a sequence having at least 85, 86, 87, 88, 89, 90, 91, 92, 93, 94, 95, 96, 97, 98, 99 and 100% identity to any one of SEQ ID NO: 3235, 3237, 3239, 3241, and 3243. In some embodiments, the Fc domain described herein having a hole variant comprises a sequence having at least 85, 86, 87, 88, 89, 90, 91, 92, 93, 94, 95, 96, 97, 98, 99 and 100% identity to any one of SEQ ID NO: 3236, 3238, 3240, 3242, and 3244. In some embodiments, the Fc domain described herein having a knob variant comprises the sequence of 3235. In some embodiments, the Fc domain described herein having a knob variant comprises the sequence of 3237. In some embodiments, the Fc domain described herein having a knob variant comprises the sequence of 3239. In some embodiments, the Fc domain described herein having a knob variant comprises the sequence of 3241. In some embodiments, the Fc domain described herein having a knob variant comprises the sequence of 3243. In some embodiments, the Fc domain described herein having a hole variant comprises the sequence of SEQ ID NO: 3236. In some embodiments, the Fc domain described herein having a hole variant comprises the sequence of SEQ ID NO: 3238. In some embodiments, the Fc domain described herein having a hole variant comprises the sequence of SEQ ID NO: 3240. In some embodiments, the Fc domain described herein having a hole variant comprises the sequence of SEQ ID NO: 3242. In some embodiments, the Fc domain described herein having a hole variant comprises the sequence of SEQ ID NO: 3244.

[0193] As for the other Fc domains, monomeric Fc domains can also include additional variants for functional alterations.

d. Fc Domain Variants

[0194] Fc domains used herein may independently include Fc modifications that affect functionality including, but not limited to, altering binding to one or more Fc receptors (e.g., FcγR and FcRn).

### (i) FcγR Variants

[0195] In some embodiments, Fc domains used herein include one or more amino acid modifications that affect binding to one or more Fcγ receptors (e.g., “FcγR variants”). FcγR variants (e.g., amino acid substitutions) that result in increased binding as well as decreased binding can be useful. For example, it is known that increased binding to FcγRIIIa results in increased ADCC (antibody dependent cell-mediated cytotoxicity; the cell-mediated reaction wherein nonspecific cytotoxic cells that express FcγRs recognize bound antibody on a target cell and subsequently cause lysis of the target cell). Similarly, decreased binding to FcγRIIb (an inhibitory receptor) can be beneficial as well in some circumstances. FcγR variants that reduce FcγR activation and Fc-mediated toxicity such as P329G, L234A, L235A can find use in the Fc fusion proteins in the current invention (see, Schlothauer et al. Protein Eng Des Sel. 2016; 29(10):457-466 incorporated herein for reference in its entirety). For example, IgG1 Fc domain incorporating P329G, L234A, L235A can be used in the current invention, and can be further modified to facilitate heterodimerization.

[0196] Additional FcγR variants can include those listed in U.S. Pat. No. 8,188,321 (particularly FIG. 41) and U.S. Pat. No. 8,084,582, and US Publ. App. Nos. 20060235208 and 20070148170, all of which are expressly incorporated herein by reference in their entirety and specifically for the variants disclosed therein that affect Fcγ receptor binding. Particular variants that find use include, but are not limited to, 236A, 239D, 239E, 332E, 332D, 239D/332E, 267D, 267E, 328F, 267E/328F, 236A/332E, 239D/332E/330Y, 239D, 332E/330L, 243A, 243L, 264A, 264V and 299T.

### (ii) FcRn Variants

[0197] Further, Fc domains used herein can independently include Fc substitutions that confer increased binding to the FcRn and increased serum half-life. Such modifications are disclosed, for example, in U.S. Pat. No. 8,367,805, hereby incorporated by reference in its entirety, and specifically for Fc substitutions that increase binding to FcRn and increase half-life. Such modifications include, but are not limited to 434S, 434A, 428L, 308F, 259I, 428L/434S, 259I/308F, 436I/428L, 436I or V/434S, 436V/428L and 259I/308F/428L.

(iii) Ablation Variants

[0198] In some embodiments, Fc domains used herein include one or more modifications that reduce or remove the normal binding of the Fc domain to one or more or all of the Fcγ receptors (e.g., FcγR1, FcγRIIa, FcγRIIb, FcγRIIIa, etc.) to avoid additional mechanisms of action. Such modifications are referred to as “FcγR ablation variants” or “Fc knock out (FcKO or KO)” variants. In some embodiments, particularly in the use of immunomodulatory proteins, it is desirable to ablate FcγRIIIa binding to eliminate or significantly reduce ADCC activity such that one of the Fc domains comprises one or more Fcγ receptor ablation variants. These ablation variants are depicted in FIG. 31 of U.S. Pat. No. 10,259,887, which is herein incorporated by reference in its entirety, and each can be independently and optionally included or excluded, with preferred aspects utilizing ablation variants selected from the group consisting of G236R/L328R, E233P/L234V/L235A/G236del/S239K, E233P/L234V/L235A/G236del/S267K, E233P/L234V/L235A/G236del/S239K/A327G, E233P/L234V/L235A/G236del/S267K/A327G and E233P/L234V/L235A/G236del, according to the EU index. It should be noted that the ablation variants referenced herein ablate FcγR binding but generally not FcRn binding.

### 3. Domain Linkers

[0199] In many embodiments herein, domain linkers are used to link the various domains together in the CC and CT binding proteins. As will be appreciated by those in the art, the length and amino acid composition of the domain linker can vary depending on which domains are to be linked using the domain linker.

a. scFv Linkers

[0200] In some embodiments, the domain linker serves to link the VH and VL domains of an Fv together to form a scFv, and can be referred to as a “scFv linker”. In these embodiments, the scFv linker is long enough to allow the VH and VL domains to properly associate such that the VH and VL will self-assemble to form a scFv.

[0201] As is known in the art, the amino acid composition of the scFv linkers is selected to confer flexibility yet do not interfere with the variable domains to allow inter-chain folding to bring the two variable domains together to form a functional antigen binding site. In some embodiments, a scFv linker comprises glycine and serine residues. The amino acid sequence of the scFv linkers can be optimized, for example, by phage-display methods to improve the specific antigen binding and production yield of the scFv. In some embodiments, a scFv linker comprises glycine and serine residues. The amino acid sequence of the scFv linkers can be optimized, for example, by phage-display methods to improve the CD3 binding and production yield of the scFv.

[0202] Examples of peptide scFv linkers suitable for linking a variable light chain domain and a variable heavy chain domain in an scFv include but are not limited to (GS)n (SEQ ID NO: 3274), (GGS)n (SEQ ID NO: 3275), (GGGS)n (SEQ ID NO: 3276), (GGSG)n (SEQ ID NO: 3277), (GGSGG)n (SEQ ID NO: 3278), or (GGGGS)n (SEQ ID NO: 3279), wherein n is 1, 2, 3, 4, 5, 6, 7, 8, 9, or 10. In one embodiment, the scFv linker can be (GGGGS)₄ (SEQ ID NO: 3280) or (GGGGS)₃ (SEQ ID NO: 3281). Variation in the linker length may retain or enhance activity, giving rise to superior efficacy in activity studies. Accordingly, in some embodiments, the scFv linker is from 10 to 25 amino acids in length. In some embodiments, the peptide scFv linker is selected from GGGGSGGGGSGGGGS (SEQ ID NO: 3282), GGGGSGGGSGGGGSGGGGS (SEQ ID NO: 3283), GGSGGSGGSGGSGG (SEQ ID NO: 3284).

[0203] As discussed herein, the scFv domains can have either orientation, that is, from N- to C-terminal, VH-scFv linker-VL or VL-scFv linker-VH.

b. scFab Linkers

[0204] In some embodiments, domain linkers are used to link the light chain VL and CL with the VH and CH1 of the heavy chain to form a single chain Fab (scFab), referred to as a “scFab linker”. Generally, scFab linkers are selected that do not hinder antibody assembly or affect Fab binding affinity to antigens. In addition, the scFab linkers present minimal adverse effects of the linker sequence on the yield or folding of the Fab.

[0205] In some embodiments, the scFab linkers are polypeptide linkers with an amino acid sequence with a length of at least 30 amino acids, for example, between 32 to 80 amino acids, or between 34 to 60 amino acids. In one embodiment, the scFab linker is (GxS)nGm with G=glycine, S=serine, (x=3, n=8, 9 or 10 and m=0, 1, 2 or 3) or (x=4 and n=6, 7 or 8 and m=0, 1, 2 or 3), preferably with x=4, n=6 or 7 and m=0, 1, 2 or 3, more preferably with x=4, n=7 and m=2. In one embodiment, the scFab linker is (GGGGS)₆G2.

[0206] In some embodiments, the natural intermolecular disulfide bond between CL and CH1 in scFab is deleted.

[0207] In some embodiments, a disulfide bond is introduced into VH and VL to further disulfide stabilization of the scFab. In one embodiment, the optional disulfide bond introduced is between VH at position 44 and VL at position 100. In one embodiment, the optional disulfide bond introduced is between VH at position 105 and VL at position 43 (numbering always according to EU index of Kabat).

[0208] Configurations of an scFab can include VH-CH1-linker-VL-CL, VL-CL-linker-VH-CH1, VH-CL-linker-VL CH1 and VL-CH1-linker-VH-CL.

c. General Domain Linkers

[0209] Aside from scFv linkers and scFab linkers, other domain linkers are used in linking two or more domains in this invention, for example, to connect the CID domains and the CD3 or TTA antigen binding domains. A domain linker may have a length that is adequate to link two domains in such a way that they assume the correct conformation relative to one another so that they retain the desired activity. In general, a linker joining two domains can be designed to (1) allow the two domains to fold and act independently of each other, (2) not have a propensity for developing an ordered secondary structure which could interfere with the functional domains of the two domains, (3) have minimal hydrophobic or charged characteristic which could interact with the functional protein domains and/or (4) provide steric separation of the two domains.

[0210] The length and composition of a domain linker can be varied considerably provided that it can fulfill its purpose as a molecular bridge. The length and composition of the linker are generally selected taking into consideration the intended function of the linker, and optionally other factors such as ease of synthesis, stability, resistance to certain chemical and/or temperature parameters, and biocompatibility.

[0211] For example, a domain linker may be a peptide which includes the following amino acid residues: Gly, Ser, Ala, or Thr. In some embodiments, the linker peptide is from about 1 to 50 amino acids in length, about 1 to 30 amino acids in length, about 1 to 20 amino acids in length, or about 5 to about 10 amino acids in length. In some embodiments, the peptide domain linker is (GXS)n or (GXS)nGm with G-glycine, S-serine, and (x=3, n=3, 4, 5 or 6, and m=0, 1, 2 or 3) or (x=4, n=2,3,4 or 5 and m=0, 1, 2 or 3). Exemplary peptide linkers include glycine-serine polymers such as (GS)n, (GGS)n, (GGGS)n, (GGSG)n (GGSGG)n, (GSGGS)n, and (GGGGS)n, wherein n is an integer of at least one (e.g., 1, 2, 3, 4, 5, 6, 7, 8, 9, or 10); glycine-alanine polymers; alanine-serine polymers; and other flexible linkers.

[0212] Alternatively, a variety of non-proteinaceous polymers can be used as a domain linker, including but not limited to polyethylene glycol (PEG), polypropylene glycol, polyoxyalkylenes, or copolymers of polyethylene glycol and polypropylene glycol.

[0213] A domain linker may also be derived from immunoglobulin light chain, for example Cκ or Cλ. Linkers can also be derived from immunoglobulin heavy chains of any isotype, including for example Cγ1, Cγ2, Cγ3, Cγ4, Cα1, Cα2, Cδ, Cε, and Cμ. For example, domain linkers can include any sequence of any length of CL/CH1 domain but not all residues of CL/CH1 domain; for example, the first 5-12 amino acid residues of the CL/CH1 domains.

[0214] A domain linker may also be derived from other proteins such as Ig-like proteins (e.g., TCR, FcR, KIR), hinge region-derived sequences, and other natural sequences from other proteins.

[0215] In some embodiments, the hinge domain of a human IgG antibody is used as a linker. The hinge domains of human IgG1, IgG2, IgG3 and IgG4 are shown in FIG. 19. In some cases, the hinge domain can contain amino acid substitutions as well. For example, a hinge domain from IgG4 comprising a S228P variant can be used. In some embodiments, the domain linker is a combination of a hinge domain and a flexible linker.

### 4. Anti-CD3 Antigen Binding Domains (αCD3 ABDs)

[0216] The T cell engaging activity of the CC binding proteins is achieved by incorporating an anti-CD3 antigen binding domain (αCD3 ABD) into the CC binding proteins.

[0217] As a part of the TCR, CD3 is a protein complex that includes a CD3λ (gamma) chain, a CD3δ (delta) chain, and two CD3ε (epsilon) chains which are present on the cell surface. CD3 associates with the α (alpha) and β (beta) chains of the TCR as well as CD3 (zeta) altogether to form the complete TCR. Clustering of CD3 on T cells, such as by immobilized anti-CD3 antibodies, leads to T cell activation similar to the engagement of the T cell receptor but independent of its clone typical specificity.

[0218] In some embodiments, the CC binding proteins described herein comprise an antigen binding domain which specifically binds to human CD3ε.

[0219] In some embodiments, the αCD3 ABD is derived from a monoclonal antibody, a polyclonal antibody, a recombinant antibody, a human antibody, or a humanized antibody. The αCD3 ABD can take any format, including but not limited to an Fv, an scFv, and an sdAb such as the VHH domain of a camelid derived sdAb and scFab.

[0220] In some embodiments, the αCD3 ABDs comprise a set of three light chain CDRs (vlCDR1, vlCDR2 and vlCDR3), and three heavy chain CDRs (vhCDR1, vhCDR2 and vhCDR3) of an anti-CD3 antibody. Exemplary anti-CD3 antibodies contributing to the CDR sets, include, but are not limited to, L2K, UCHT1, variants of UCHT1 including UCHT1.v1 and UCHT1.v9, muromonab-CD3 (OKT3), otelixizumab (TRX4), teplizumab (MGA031), visilizumab (Nuvion), SP34, TR-66 or X35-3, VIT3, BMA030 (BW264/56), CLB-T3/3, CRIS7, YTH12.5, F111-409, CLBT3.4.2, TR-66, WT32, SPv-T3b, 11D8, XIII-141, XIII-46, XIII-87, 12F6, T3/RW2-8C8, T3/RW2-4B6, OKT3D, M-T301, SMC2, F101.01, and WT-31. Exemplary amino acid sequences of an αCD3 ABD or an αCD3 antibody are provided in FIGS. 7A-7C and 7E.

[0221] In some embodiments, the αCD3 ABD in this invention has from 0, 1, 2, 3, 4, 5 or 6 amino acid modifications based on the CDRs in the exemplary anti-CD3 antigen binding domains described herein (with amino acid substitutions finding particular use). That is, in some embodiments, the CDRs can be modified as long as the total number of changes in the set of 6 CDRs is less than 6 amino acid modifications, with any combination of CDRs being changed; e.g., there may be one amino acid change in vlCDR1, two in vhCDR2, none in vhCDR3, etc.

[0222] In some embodiments, the αCD3 ABD is humanized or from human. For example, the αCD3 ABD can comprise a light chain variable region comprising human CDRs or non-human light chain CDRs in a human light chain framework region; and a heavy chain variable region comprising human or non-human heavy chain CDRs in a human heavy chain framework region. In some embodiments, the light chain framework region is a lamda light chain framework. In other embodiments, the light chain framework region is a kappa light chain framework.

[0223] In some embodiments, the αCD3 ABD has an affinity to CD3 on CD3 expressing cells with a K_{D} of 1000 nM or less, 500 nM or less, 200 nM or less, 100 nM or less, 80 nM or less, 50 nM or less, 20 nM or less, 10 nM or less, 5 nM or less, 1 nM or less, or 0.5 nM or less. The affinity to bind to CD3 can be determined, for example, by Surface Plasmon Resonance (SPR).

[0224] In one aspect, the composition of the present disclosure comprises a CD3 binding domain comprising a variable heavy (VH) domain comprising a vhCDR1, vhCDR2, and vhCDR3 sequence and a variable light (VL) domain comprising a vlCDR1, vlCDR2, and vlCDR3 sequence.

[0225] In some embodiments, the vhCDR1, vhCDR2 and vhCDR3 sequences and said vlCDR1, vlCDR2, and vlCDR3 sequences may be selected from the group consisting of the vhCDR1, vhCDR2 and vhCDR3 sequences and the vlCDR1, vlCDR2, and vlCDR3 sequences from FIGS. 7A-7C optionally with one or more mutations. In some embodiments, the vhCDR1, vhCDR2 and vhCDR3 sequences and said vlCDR1, vlCDR2, and vlCDR3 sequences may be selected from the group consisting of the vhCDR1, vhCDR2 and vhCDR3 sequences and the vlCDR1, vlCDR2, and vlCDR3 sequences from FIGS. 7A-7C optionally with one or more mutations at positions corresponding to one or more of positions 30, 53, 54, and 100 in a heavy chain (HC) domain of Ab1091. In some embodiments, the vhCDR1, vhCDR2 and vhCDR3 sequences and said vlCDR1, vlCDR2, and vlCDR3 sequences may be selected from the group consisting of the vhCDR1, vhCDR2 and vhCDR3 sequences and the vlCDR1, vlCDR2, and vlCDR3 sequences from FIGS. 7A-7C.

[0226] In some embodiments, the vhCDR1, vhCDR2 and vhCDR3 sequences and said vlCDR1, vlCDR2, and vlCDR3 sequences may be selected from the group consisting of the vhCDR1, vhCDR2 and vhCDR3 sequences and the vlCDR1, vlCDR2, and vlCDR3 sequences from Ab0640, Ab0769, Ab0770, Ab0771, Ab0772, Ab0773, Ab0774, Ab0775, Ab0776, Ab0907, Ab0908, Ab0911, Ab0912, Ab0913, Ab0914, Ab0915, Ab0916, Ab0917, Ab0918, Ab0919, Ab0920, Ab0921, Ab0922, Ab0923, Ab0924, Ab0925, Ab0926, Ab0927, Ab0928, Ab0929, Ab0930, Ab1091, Ab1133, Ab 1134, Ab 1135, Ab1136, and Ab1137 of FIGS. 7A-7C. In some embodiments, the sequences are from Ab0640. In some embodiments, the sequences are from Ab0769. In some embodiments, the sequences are from Ab0770. In some embodiments, the sequences are from Ab0771. In some embodiments, the sequences are from Ab0772. In some embodiments, the sequences are from Ab0773. In some embodiments, the sequences are from Ab0774. In some embodiments, the sequences are from Ab0775. In some embodiments, the sequences are from Ab0776. In some embodiments, the sequences are from Ab0907. In some embodiments, the sequences are from Ab0908. In some embodiments, the sequences are from Ab0911. In some embodiments, the sequences are from Ab0912. In some embodiments, the sequences are from Ab0913. In some embodiments, the sequences are from Ab0914. In some embodiments, the sequences are from Ab0915. In some embodiments, the sequences are from Ab0916. In some embodiments, the sequences are from Ab0917. In some embodiments, the sequences are from Ab0918. In some embodiments, the sequences are from Ab0919. In some embodiments, the sequences are from Ab0920. In some embodiments, the sequences are from Ab0921. In some embodiments, the sequences are from Ab0922. In some embodiments, the sequences are from Ab0923. In some embodiments, the sequences are from Ab0924. In some embodiments, the sequences are from Ab0925. In some embodiments, the sequences are from Ab0926. In some embodiments, the sequences are from Ab0927. In some embodiments, the sequences are from Ab0928. In some embodiments, the sequences are from Ab0929. In some embodiments, the sequences are from Ab0930. In some embodiments, the sequences are from Ab1091. In some embodiments, the sequences are from Ab1133. In some embodiments, the sequences are from Ab1134. In some embodiments, the sequences are from Ab1135. In some embodiments, the sequences are from Ab1136. In some embodiments, the sequences are from Ab1137.

[0227] In some embodiments, the vhCDR1, vhCDR2 and vhCDR3 sequences and said vlCDR1, vlCDR2, and vlCDR3 sequences may be selected from the group consisting of the vhCDR1, vhCDR2 and vhCDR3 sequences and the vlCDR1, vlCDR2, and vlCDR3 sequences from the Ab1091 optionally with one or more mutations at positions 30, 53, 54, and 100 in the HC domain. In some embodiments, the vhCDR1, vhCDR2 and vhCDR3 sequences and said vlCDR1, vlCDR2, and vlCDR3 sequences may be selected from the group consisting of the vhCDR1, vhCDR2 and vhCDR3 sequences and the vlCDR1, vlCDR2, and vlCDR3 sequences from the Ab1091.

[0228] In some embodiments, the CD3 binding domain may comprise a VH domain and VL domain selected from the group consisting of the VH and VL domains from FIGS. 7A-7C optionally with one or more mutations. In some embodiments, the CD3 binding domain may comprise a VH domain and VL domain selected from the group consisting of the VH and VL domains from FIGS. 7A-7C.

[0229] In some embodiments, the CD3 binding domain may comprise a sequence having at least 85%, 86%, 87%, 88%, 89%, 90%, 91%, 92%, 93%, 94%, 95%, 96%, 97%, 98%, 99%, 100% sequence identity with the VH domain sequence of the Ab1091 and a sequence having at least 85%, 86%, 87%, 88%, 89%, 90%, 91%, 92%, 93%, 94%, 95%, 96%, 97%, 98%, 99%, 100% sequence identity with the VL domain sequence of the Ab1091. In some embodiments, the CD3 binding domain may comprise the VH and VL domain sequences of the Ab1091. In some embodiments, the CD3 binding domain may comprise the Ab1091.

[0230] In some embodiments, the vhCDR1, vhCDR2 and vhCDR3 sequences and said vlCDR1, vlCDR2, and vlCDR3 sequences may comprise one or more mutations selected from the group consisting of mutations corresponding to LC L54R, HC N53S+LC L54R+S56P, HC N53Q+LC L54R+S56P, HC N100S+LC L54R+S56P, HC S100aA+LC L54R+S56P, HC V100cA+LC L54R+S56P, HC S100dA+LC L54R+S56P, and LC L54R+S56P+W91Y in the HC domain of the Ab0640. In some embodiments, the vhCDR1, vhCDR2 and vhCDR3 sequences and said vlCDR1, vlCDR2, and vlCDR3 sequences may comprise one or more mutations selected from the group consisting of mutations corresponding to N30S, N53S, N53Q, N54A, and S100aA in the HC domain of the Ab1091. In some embodiments, the sequences have a mutation corresponding to said N30S. In some embodiments, the sequences have a mutation corresponding to said N53S. In some embodiments, the sequences have a mutation corresponding to said N53Q. In some embodiments, the sequences have a mutation corresponding to said N54A. In some embodiments, the sequences have a mutation corresponding to said S100aA.

[0231] In some embodiments, said composition comprises an Fc domain with one or more knob variants. In some embodiments, said composition comprises an Fc domain with one or more hole variants. Some examples of the knob and hole Fc sequences are disclosed in FIG. 10.

[0232] In some embodiments, the Fc domain described herein having a knob variant comprises a sequence having at least 85, 86, 87, 88, 89, 90, 91, 92, 93, 94, 95, 96, 97, 98, 99 and 100% identity to any one of SEQ ID NO: 3235, 3237, 3239, 3241, and 3243. In some embodiments, the Fc domain described herein having a hole variant comprises a sequence having at least 85, 86, 87, 88, 89, 90, 91, 92, 93, 94, 95, 96, 97, 98, 99 and 100% identity to any one of SEQ ID NO: 3236, 3238, 3240, 3242, and 3244. In some embodiments, the Fc domain described herein having a knob variant comprises the sequence of 3235. In some embodiments, the Fc domain described herein having a knob variant comprises the sequence of 3237. In some embodiments, the Fc domain described herein having a knob variant comprises the sequence of 3239. In some embodiments, the Fc domain described herein having a knob variant comprises the sequence of 3241. In some embodiments, the Fc domain described herein having a knob variant comprises the sequence of 3243. In some embodiments, the Fc domain described herein having a hole variant comprises the sequence of SEQ ID NO: 3236. In some embodiments, the Fc domain described herein having a hole variant comprises the sequence of SEQ ID NO: 3238. In some embodiments, the Fc domain described herein having a hole variant comprises the sequence of SEQ ID NO: 3240. In some embodiments, the Fc domain described herein having a hole variant comprises the sequence of SEQ ID NO: 3242. In some embodiments, the Fc domain described herein having a hole variant comprises the sequence of SEQ ID NO: 3244.

[0233] In some embodiments, the composition may comprise a CD3 binding domain comprising scFv means for binding CD3 to a scFv. In some embodiments, the composition may comprise CD3 binding domain comprising Fab means for binding CD3. In some embodiments, the composition may be a nucleic acid composition comprising a polynucleotide encoding a composition comprising an indinavir binding domain. In some embodiments, an expression vector composition may comprise the nucleic acid composition. In some embodiments, a host cell may comprise the expression vector.

### 5. Anti-Tumor Targeting Antigen Binding Domains (αTTABDs)

[0234] All three formats of the invention rely on the use of targeting to tumors, and thus all formats utilize one or more anti-tumor targeting antigen binding domains (αTTABDs).

[0235] CT binding proteins described in this invention comprises one or more anti-tumor targeting antigen binding domains (αTTABDs). In some embodiments, the αTTABD binds to a target antigen involved in and/or associated with a tumorous disease, disorder or condition. In some embodiments, the αTTABD binds to a tumor-associated antigen, which is a cell surface molecule such as a protein, lipid or polysaccharide. In some embodiments, the αTTABD binds to a tumor-associated antigen expressed on a tumor cell or tumor microenvironment.

[0236] CTCoS binding proteins described in this invention comprises one or more anti-tumor targeting antigen binding domains (αTTABDs). In some embodiments, the αTTABD binds to a target antigen involved in and/or associated with a tumorous disease, disorder or condition. In some embodiments, the αTTABD binds to a tumor-associated antigen, which is a cell surface molecule such as a protein, lipid or polysaccharide. In some embodiments, the αTTABD binds to a tumor-associated antigen expressed on a tumor cell or tumor microenvironment.

[0237] CTTCoS binding proteins described in this invention comprises two or more anti-tumor targeting antigen binding domains (αTTABDs). In some embodiments, the αTTABDs bind to target antigens involved in and/or associated with a tumorous disease, disorder or condition. In some embodiments, the αTTABDs bind to a tumor-associated antigen, which is a cell surface molecule such as a protein, lipid or polysaccharide. In some embodiments, the αTTABDs bind to a tumor-associated antigen expressed on a tumor cell or tumor microenvironment. In some embodiments, the two or more αTTABDs in the CTCoS binding proteins bind to the same tumor-associated antigen. In some embodiments, the two or more αTTABDs in the CTCoS binding proteins bind to different tumor-associated antigens.

[0238] The αTTABDs in this invention can take any format, including but not limited to a full antibody, a Fab, an Fv, a single chain variable fragments (scFv), a scFab, a single domain antibody such as the VHH of camelid derived single domain antibody.

[0239] In some embodiments, the αTTABDs bind to a tumor-associated antigen expressed on tumor cells. For example, the tumor-associated antigen can be CD19, and the BrighT-LITE incorporating an α-CD19 antigen binding domain (ABD) can be used to target CD19 expressing tumors, such as most B cell malignancies including but not limited to acute lymphoblastic leukemia (ALL), chronic lymphocytic leukemia (CLL) and B cell lymphomas. Exemplary α-CD19 ABDs can include one or more CDRs derived from the anti-CD19 binding domain of Blinatumomab, SAR3419, MEDI-551, or Combotox. In some other embodiments, α-CD19 ABDs can include one or more CDRs derived from an anti-CD19 antibody, such as clone FMC63 or clone HD37.

[0240] Other tumor-associated antigens include but are not limited to EpCAM, HER2, and CD20. In some embodiments, said other tumor-associated antigen is EpCAM.

[0241] In one aspect, a composition of the present disclosure comprises an EpCAM binding domain comprising, a) a variable heavy (VH) domain comprising a vhCDR1, vhCDR2, and vhCDR3 sequence; b) a variable light (VL) domain comprising a vlCDR1, vlCDR2, and vlCDR3 sequence.

[0242] In some embodiments, the vhCDR1, vhCDR2 and vhCDR3 sequences and said vlCDR1, vlCDR2, and vlCDR3 sequences may be selected from the group consisting of the vhCDR1, vhCDR2 and vhCDR3 sequences and the vlCDR1, vlCDR2, and vlCDR3 sequences from FIGS. 8A-8C optionally with one or more mutations. In some embodiments, the vhCDR1, vhCDR2 and vhCDR3 sequences and said vlCDR1, vlCDR2, and vlCDR3 sequences may be selected from the group consisting of the vhCDR1, vhCDR2 and vhCDR3 sequences and the vlCDR1, vlCDR2, and vlCDR3 sequences from FIGS. 8A-8E optionally with one or more mutations at positions corresponding to one or more of positions 60 and 97 in the HC domain and 91 in the LC domain of Ab1090. In some embodiments, the vhCDR1, vhCDR2 and vhCDR3 sequences and said vlCDR1, vlCDR2, and vlCDR3 sequences may be selected from the group consisting of the vhCDR1, vhCDR2 and vhCDR3 sequences and the vlCDR1, vlCDR2, and vlCDR3 sequences from FIGS. 8A-8C.

[0243] In some embodiments, the vhCDR1, vhCDR2 and vhCDR3 sequences and said vlCDR1, vlCDR2, and vlCDR3 sequences may be selected from the group consisting of the vhCDR1, vhCDR2 and vhCDR3 sequences and the vlCDR1, vlCDR2, and vlCDR3 sequences from Ab0682, Ab0823, Ab0824, Ab0825, Ab0826, Ab0827, Ab0828, Ab0829, Ab0830, Ab0831, Ab0832, Ab0833, Ab0834, Ab0835, Ab0836, Ab0837, Ab0838, Ab0839, Ab0840, Ab0841, Ab0842, Ab0843, Ab0844, Ab0845, Ab0846, Ab0847, Ab1008, Ab1009, Ab1010, Ab1012, Ab1014, Ab1016, Ab1017, Ab1018, Ab1019, Ab1020, Ab1021, Ab1022, Ab1023, Ab1024, Ab1025, Ab1026, Ab1027, Ab1028, Ab1029, Ab1030, Ab1031, Ab1066, Ab1069, Ab1088, Ab1089, Ab1090 of FIGS. 8A-8C. In some embodiments, the sequences are from A0682. In some embodiments, the sequences are from Ab0823. In some embodiments, the sequences are from Ab0824. In some embodiments, the sequences are from Ab0825. In some embodiments, the sequences are from Ab0826. In some embodiments, the sequences are from Ab0827. In some embodiments, the sequences are from Ab0828. In some embodiments, the sequences are from Ab0829. In some embodiments, the sequences are from Ab0830. In some embodiments, the sequences are from Ab0831. In some embodiments, the sequences are from Ab0832. In some embodiments, the sequences are from Ab0833. In some embodiments, the sequences are from Ab0834. In some embodiments, the sequences are from Ab0835. In some embodiments, the sequences are from Ab0836. In some embodiments, the sequences are from Ab0837. In some embodiments, the sequences are from Ab0838. In some embodiments, the sequences are from Ab0839. In some embodiments, the sequences are from Ab0840. In some embodiments, the sequences are from Ab0841. In some embodiments, the sequences are from Ab0842. In some embodiments, the sequences are from Ab0843. In some embodiments, the sequences are from Ab0844. In some embodiments, the sequences are from Ab0845. In some embodiments, the sequences are from Ab0846. In some embodiments, the sequences are from Ab0847. In some embodiments, the sequences are from Ab1008. In some embodiments, the sequences are from Ab1009. In some embodiments, the sequences are from Ab1010. In some embodiments, the sequences are from Ab1012. In some embodiments, the sequences are from Ab1012. In some embodiments, the sequences are from Ab1014. In some embodiments, the sequences are from Ab1016. In some embodiments, the sequences are from Ab1017. In some embodiments, the sequences are from Ab1018. In some embodiments, the sequences are from Ab1019. In some embodiments, the sequences are from Ab1020. In some embodiments, the sequences are from Ab1021. In some embodiments, the sequences are from Ab1022. In some embodiments, the sequences are from Ab1023. In some embodiments, the sequences are from Ab1024. In some embodiments, the sequences are from Ab1025. In some embodiments, the sequences are from Ab1026. In some embodiments, the sequences are from Ab1027. In some embodiments, the sequences are from Ab1028. In some embodiments, the sequences are from Ab1029. In some embodiments, the sequences are from Ab1030. In some embodiments, the sequences are from Ab1031. In some embodiments, the sequences are from Ab1066. In some embodiments, the sequences are from Ab1069. In some embodiments, the sequences are from Ab1088. In some embodiments, the sequences are from Ab1089. In some embodiments, the sequences are from Ab1090.

[0244] In some embodiments, the vhCDR1, vhCDR2 and vhCDR3 sequences and said vlCDR1, vlCDR2, and vlCDR3 sequences may be selected from the group consisting of the vhCDR1, vhCDR2 and vhCDR3 sequences and the vlCDR1, vlCDR2, and vlCDR3 sequences from the Ab1090 optionally with one or more mutations at positions corresponding to one or more of positions 60 and 97 in the HC domain and 91 in the LC domain.

[0245] In some embodiments, one or more of the vhCDR1, vhCDR2 and vhCDR3 sequences and the vlCDR1, vlCDR2, and vlCDR3 sequences may be selected from the group consisting of the vhCDR1, vhCDR2 and vhCDR3 sequences and the vlCDR1, vlCDR2, and vlCDR3 sequences from the Ab1090. In some embodiments, the EpCAM binding domain may comprise a VH domain and VL domain selected from the group consisting of the VH and VL domains from FIGS. 8A-8C optionally with one or more mutations. In some embodiments, the EpCAM binding domain may comprise a VH domain and VL domain selected from the group consisting of the VH and VL domains from FIGS. 8A-8C.

[0246] In some embodiments, the EpCAM binding domain may comprise a sequence having at least 70, 71, 72, 73, 74, 75, 76, 77, 78, 79, 80, 81, 82, 83, 84, 85, 86, 87, 88, 89, 90, 91, 92, 93, 94, 95, 96, 97, 98, 99 or 100% sequence identity with the VH domain sequence of the Ab1090 and/or a sequence having at least 70, 71, 72, 73, 74, 75, 76, 77, 78, 79, 80, 81, 82, 83, 84, 85, 86, 87, 88, 89, 90, 91, 92, 93, 94, 95, 96, 97, 98, 99 or 100% sequence identity with the VL domain sequence of the Ab1090. In some embodiments, the EpCAM binding domain may comprise the VH and VL domain sequences of the Ab1090. In some embodiments, the EpCAM binding domain may comprise the Ab1090.

[0247] In some embodiments, the vhCDR1, vhCDR2 and vhCDR3 sequences and said vlCDR1, vlCDR2, and vlCDR3 sequences may comprise one or more mutations selected from the group consisting of mutations corresponding to HC:D73N, HC:S76N, HC:T93A, HC:N31S, HC:W33F, HC:W33H, HC:W33Y, HC:N35S, HC:D96E, HC:G97A, HC:N35H, HC:A40S, HC:A40H, HC:S52cY, HC:A60V, HC:S102Y, LC:W91A, LC:W91F, LC:W91H, LC:W91Y, LC:A43S, and LC:S76Q of the Ab0835. In some embodiments, the vhCDR1, vhCDR2 and vhCDR3 sequences and said vlCDR1, vlCDR2, and vlCDR3 sequences may comprise one or more mutations selected from the group consisting of mutations corresponding to G97A and A60V in the HC domain and W91A in the LC domain of the Ab1069. In some embodiments, the sequences have a mutation corresponding to said G97A. In some embodiments, the sequences have a mutation corresponding to said A60V. In some embodiments, the sequences have a mutation corresponding to said W91A.

[0248] In some embodiments, the EpCAM binding domain may comprise scFv means for binding indinavir. In some embodiments, the EpCAM binding domain may comprise Fab means for binding indinavir.

[0249] In some embodiments, said composition comprises an Fc domain with one or more knob variants. In some embodiments, said composition comprises an Fc domain with one or more hole variants. Some examples of the knob and hole Fc sequences are disclosed in FIG. 10.

[0250] In some embodiments, the Fc domain described herein having a knob variant comprises a sequence having at least 85, 86, 87, 88, 89, 90, 91, 92, 93, 94, 95, 96, 97, 98, 99 and 100% identity to any one of SEQ ID NO: 3235, 3237, 3239, 3241, and 3243. In some embodiments, the Fc domain described herein having a hole variant comprises a sequence having at least 85, 86, 87, 88, 89, 90, 91, 92, 93, 94, 95, 96, 97, 98, 99 and 100% identity to any one of SEQ ID NO: 3236, 3238, 3240, 3242, and 3244. In some embodiments, the Fc domain described herein having a knob variant comprises the sequence of 3235. In some embodiments, the Fc domain described herein having a knob variant comprises the sequence of 3237. In some embodiments, the Fc domain described herein having a knob variant comprises the sequence of 3239. In some embodiments, the Fc domain described herein having a knob variant comprises the sequence of 3241. In some embodiments, the Fc domain described herein having a knob variant comprises the sequence of 3243. In some embodiments, the Fc domain described herein having a hole variant comprises the sequence of SEQ ID NO: 3236. In some embodiments, the Fc domain described herein having a hole variant comprises the sequence of SEQ ID NO: 3238. In some embodiments, the Fc domain described herein having a hole variant comprises the sequence of SEQ ID NO: 3240. In some embodiments, the Fc domain described herein having a hole variant comprises the sequence of SEQ ID NO: 3242. In some embodiments, the Fc domain described herein having a hole variant comprises the sequence of SEQ ID NO: 3244.

[0251] In some embodiments, the composition may be a nucleic acid composition comprising a polynucleotide encoding a composition comprising an indinavir binding domain. In some embodiments, an expression vector composition comprising the nucleic acid composition. In some embodiments, a host cell may comprise the expression vector.

6. Co-Stimulatory Domains (CoS domain)

[0252] CTCoS binding proteins described in this invention comprise one or more T cell co-stimulatory domains (CoS domain). The CoS domains can be antigen binding domains (ABDs, generally the VH and VL domains that form an Fv) from antibodies or ligands that bind to and activate a costimulatory receptor on a T cell, and as result activate the T cell. Co-stimulatory receptors on T cells include, for example, CD28, ICOS, 4-1BB, OX40, CD27, CD40, CD40L, and GITR.

[0253] CTTCoS binding proteins described in this invention comprises one or more T cell co-stimulatory domains (CoS domain). The CoS domains can be antigen binding domains (ABDs, generally the VH and VL domains that form an Fv) from antibodies or ligands that bind to and activate a costimulatory receptor on a T cell, and as result activate the T cell. Co-stimulatory receptors on T cells include, for example, CD28, ICOS, 4-1BB, OX40, CD27, CD40, CD40L, and GITR.

[0254] Accordingly, for example, the CoS domain can be an ABD comprising the variable heavy and variable light domains from an agonistic anti-CD28 antibody, including, for example, the sequence disclosed in FIG. 11.

[0255] In some embodiments, the CoS domain is a monomeric or trimeric 4-1BBL that binds 4-1BB. The amino acid sequence of the monomeric and trimeric 4-1BBL can be used. The CoS domain can also comprise an ABD comprising the variable heavy and variable light domains from an agonistic anti-4-1-BB antibody such as BMS-663513 urelumab. More anti-4-1BB antibodies can be found, for example, in U.S. Pat. No. 7,288,638 (incorporated by reference herein in its entirety and in particular for the anti-4-1BB variable heavy and variable light domain sequences disclosed therein).

[0256] The CoS domain can be ICOS-L (CD275) that binds ICOS. The CoS domain can also be an ABD from an anti-ICOS antibody that activates ICOS, such as the ABD comprising the variable heavy and variable light domains from MEDI-570 or JTX-2011.

[0257] In some embodiments, the CoS domain is OX40L (CD252) that binds OX40. The CoS can also include an ABD comprising the variable heavy and variable light domains from an anti-OX40 antibody that activates OX40 (see, for example, WO 2006/029879 or WO 2010/096418, incorporated by reference herein in their entireties and in particular for the anti-OX40 variable heavy and variable light domain sequences).

[0258] In some embodiments, the CoS domain includes an ABD from an anti-GITR antibody that activates GITR such as TRX518 (see, for example, U.S. Pat. No. 7,812,135, incorporated by reference herein in its entirety and in particular for the anti-OX40 variable heavy and variable light domain sequences).

[0259] In some embodiments, the CoS domain is CD70 that binds CD27. The CoS domain can also include an ABD from an anti-CD27 antibody that activates CD27, such as varlilumab CDX-1127 (see, for example, WO 2016/145085 and U.S. Patent Publication Nos. US 2011/0274685 and US 2012/0213771, incorporated by reference herein in their entireties and in particular for the anti-CD27 variable heavy and variable light domain sequences).

[0260] The CoS domain can be CD40L (CD154) that binds CD40. The CoS domain can be CD40 that binds CD40L. The CoS domain can include an ABD from an agonistic antibody targeting CD40, such as CP-870,893, lucatumumab, dacetuzumab.

[0261] The CoS domains can include antigen binding domains or ligands that bind to and inhibit a coinhibitory receptor on a T cell, and as result activating the T cell. Co-inhibitory receptors on T cells include, for example, PD-1, CTLA4, LAG3, B7-H1, B7-1, CD160, BTLA, LAIR1, TIM3, 2B4, and TIGIT.

[0262] For example, the CoS domain used herein can be an ABD from an inhibitory antibody that binds to PD-1, including, but not limited to, nivolumab, BMS-936558, MDX-1106, ONO-4538, AMP224, CT-011, and MK-3475 (pembrolizumab), cemiplimab (REGN2810), SHR-1210 (CTR20160175 and CTR20170090), SHR-1210 (CTR20170299 and CTR20170322), JS-001 (CTR20160274), IBI308 (CTR20160735), BGB-A317 (CTR20160872) and/or a PD-1 antibody as recited in U.S. Patent Publication No. 2017/0081409. There are two approved anti-PD-1 antibodies, pembrolizumab (Keytruda®; MK-3475-033) and nivolumab (Opdivo®; CheckMate078) and many more in development, the ABDs of which can be used in this invention. Exemplary anti-PD-1 antibody sequences are shown in FIG. 11.

[0263] In some embodiments, the CoS domain comprises an ABD from an anti-CTLA4 antibody, such as ipilimumab, tremelimumab. In some embodiments, the CoS domain comprises the ABD from an anti-LAG-3 antibody such as IMP-321.

[0264] In some embodiments, the CoS domain comprises an ABD from an anti-TIM-3 antibody (see, for example, WO 2013/006490 or U.S. Patent Publication No US 2016/0257758, incorporated by reference herein in their entireties, and in in particular for the anti-TIM-3 variable heavy and variable light domain sequences).

### 7. Format 1 Complexes

[0265] As generally outlined herein, the Format 1 inventions provide pairs of binding proteins (e.g. a CC binding protein and a CT binding protein) that together, in the presence of a iCID-SM, form a T cell engaging complex. Generally, each binding protein is in turn made up of either two fusion polypeptides (that together form either a CC binding protein or a CT binding protein), or a monomeric fusion polypeptide as outlined below. As will be appreciated by those in the art, the CC binding proteins and the CT binding proteins can each be independently selected from monomeric fusion polypeptides, homodimeric fusion polypeptides and heterodimeric fusion polypeptides.

a. CC Binding Proteins

[0266] Accordingly, the present invention provides CC fusion polypeptides that form the CC binding protein(s) of the invention. Each CC binding protein contains one or more first iCID domain, and an anti-CD3 ABD. In some embodiments, the CC binding protein does not contain an Fc domain, such as direct fusion of a first iCID domains and an αCD3-ABD. Both the iCID domain and the αCD3 ABD can take the format of an scFv, a Fab, an scFab or a single domain antibody such as the VHH of camelid derived single domain antibody. In some embodiments, the CC binding protein contains an Fc domain. In some cases, the CC binding protein is monomeric. It can include an iCID domain directly fused to an αCD3-ABD, or it can also rely on the use of a monomeric Fc domain, as more fully outlined below. In some embodiments, the CC binding protein comprises a first and a second CC fusion polypeptide, that come together as dimers, either heterodimeric or homodimeric, to provide the αCD3-ABD functionally coupled to an iCID domain.

### (i) Monomeric CC Fusion Polypeptides

[0267] In some embodiments, the CC binding protein is monomeric and relies on the use of a monomeric IgG4 Fc domain. In some embodiments, the CC binding proteins are monomeric proteins comprising one or more iCID domain, an αCD3-ABD, optional domain linker(s) and an IgG4 monomeric Fc domain. The CC binding polypeptide can be a fusion polypeptide with a structure selected from the group, from N- to C-terminal: CID domain-optional domain linker-αCD3 ABD-optional domain linker-Fc domain; αCD3 ABD-optional domain linker-iCID domain-optional domain linker-Fc domain; iCID domain-optional domain linker-Fc domain-optional domain linker-αCD3-ABD; αCD3 ABD-optional domain linker-Fc domain-optional domain linker-iCID domain; Fc domain-optional domain linker-αCD3-ABD-optional domain linker-iCID domain; and Fc domain-optional domain linker-iCID domain-optional domain linker-αCD3 ABD; iCID domain-optional domain linker-iCID domain-optional domain linker-αCD3 ABD-optional domain linker-Fc domain; and iCID domain-optional domain linker-iCID domain-optional domain linker-αCD3 ABD-optional domain linker-Fc domain. Either or both of the iCID and αCD3 ABD can take any one of the formats including Fab, scFv, scFab, a single domain antibody such as the VHH of camelid derived single domain antibody.

[0268] In some instances, the selected arrangements of domains of the monomeric CC binding protein employed in the T-LITE composition provide an improvement, e.g., in synthesis, stability, affinity or effector function, over other structures disclosed herein or known in the art. In some cases, a 2-fold, 3-fold, or 4-fold increase in, e.g. synthesis, stability, affinity, or effector activity is observed. In some cases, a 5-fold, 6-fold, 7-fold, 8-fold, 9-fold, 10-fold or higher increase in, e.g. stability, affinity, or effector activity, is observed.

### (ii) Dimeric CC Binding Proteins

[0269] In some embodiments, the CC binding protein comprises a first and a second CC fusion polypeptide, that come together as dimers, either heterodimeric or homodimeric, to provide the αCD3-ABD functionally coupled to a iCID domain. In these embodiments, the CC binding proteins rely on the use of Fc domains that are dimers, either heterodimeric Fc domains or homodimeric Fc domains.

[0270] In some embodiments, the CC binding proteins are CC heterodimeric binding proteins that use heterodimerization variants in the Fc domains. Thus, in some embodiments, the CC binding protein comprises a first and a second CC fusion polypeptide, wherein one of the first and second CC fusion polypeptides contains the αCD3-ABD and the other the iCID domain. In some embodiments, the CC binding protein comprises a first CC fusion polypeptide which contains both the αCD3-ABD and the iCID domain, and a second CC fusion polypeptide comprising an empty Fc domain. In these embodiments, the first and second CC fusion polypeptides can have the structures (from N- to C-terminal, with “DL” standing for “domain linker”) shown in Table 4. In some embodiments, each of the CC fusion polypeptide having one iCID domains may further comprise another iCID domain linked to the iCID domain via an optional DL, for example, as shown in 37-40 in Table 4 below. The iCID domains in the same fusion polypeptide may be identical. In some embodiments, the iCID domains in the same fusion polypeptide may be different. The DLs in the same fusion polypeptide may be different. In some embodiments, the DLs in the same fusion polypeptide may be same.

TABLE 4

| | First CC fusion polypeptide | Second CC fusion polypeptide |
|---|---|---|
| | (N- to C- terminal) | (N- to C- terminal) |
| 1 | Fc domain | iCID-DL-Fc domain |
| 2 | Fc domain | αCD3-ABD-DL-Fc domain |
| 3 | Fc domain | αCD3-ABD-DL-iCID-DL-Fc domain |
| 4 | Fc domain | iCID-DL-αCD3-ABD-DL-Fc domain |
| 5 | Fc domain | Fc domain-DL-iCID |
| 6 | Fc domain | Fc domain-DL-αCD3-ABD |
| 7 | Fc domain | Fc domain-DL-αCD3-ABD-DL-iCID |
| 8 | Fc domain | Fc domain-DL-iCID-DL-αCD3-ABD |
| 9 | iCID-DL-Fc domain | αCD3-ABD-DL-Fc domain |
| 10 | iCID-DL-Fc domain | αCD3-ABD-DL-iCID-DL-Fc domain |
| 11 | iCID-DL-Fc domain | iCID-DL-αCD3-ABD-DL-Fc domain |
| 12 | iCID-DL-Fc domain | Fc domain-DL-iCID |
| 13 | iCID-DL-Fc domain | Fc domain-DL-αCD3-ABD |
| 14 | iCID-DL-Fc domain | Fc domain-DL-αCD3-ABD-DL-iCID |
| 15 | iCID-DL-Fc domain | Fc domain-DL-iCID-DL-αCD3 ABD |
| 16 | αCD3-ABD-DL-Fc domain | αCD3 ABD-DL-iCID-DL-Fc domain |
| 17 | αCD3 ABD-DL-Fc domain | iCID-DL-αCD3 ABD-DL-Fc domain |
| 18 | αCD3 ABD-DL-Fc domain | Fc domain-DL-iCID |
| 19 | αCD3 ABD-DL-Fc domain | Fc domain-DL-αCD3 ABD |
| 20 | αCD3 ABD-DL-Fc domain | Fc domain-DL-αCD3 ABD-DL-iCID |
| 21 | αCD3 ABD-DL-Fc domain | Fc domain-DL-iCID-DL-αCD3 ABD |
| 22 | αCD3 ABD-DL-iCID-DL-Fc domain | iCID-DL-αCD3 ABD-DL-Fc domain |
| 23 | αCD3 ABD-DL-iCID-DL-Fc domain | Fc domain-DL-iCID |
| 24 | αCD3 ABD-DL-iCID-DL-Fc domain | Fc domain-DL-αCD3 ABD |
| 25 | αCD3 ABD-DL-iCID-DL-Fc domain | Fc domain-DL-αCD3 ABD-DL-iCID |
| 26 | αCD3 ABD-DL-iCID-DL-Fc domain | Fc domain-DL-iCID-DL-αCD3 ABD |
| 27 | iCID-DL-αCD3 ABD-DL-Fc domain | Fc domain-DL-iCID |
| 28 | iCID-DL-αCD3 ABD-DL-Fc domain | Fc domain-DL-αCD3 ABD |
| 29 | iCID-DL-αCD3 ABD-DL-Fc domain | Fc domain-DL-αCD3 ABD-DL-iCID |
| 30 | iCID-DL-αCD3 ABD-DL-Fc domain | Fc domain-DL-iCID-DL-αCD3 ABD |
| 31 | Fc domain-DL-iCID | Fc domain-DL-αCD3 ABD |
| 32 | Fc domain-DL-iCID | Fc domain-DL-αCD3 ABD-DL-iCID |
| 33 | Fc domain-DL-iCID | Fc domain-DL-iCID-DL-αCD3 ABD |
| 34 | Fc domain-DL-αCD3 ABD | Fc domain-DL-αCD3 ABD-DL-iCID |
| 35 | Fc domain-DL-αCD3 ABD | Fc domain-DL-iCID-DL-αCD3 ABD |
| 36 | Fc domain-DL-αCD3 ABD-DL-iCID | Fc domain-DL-iCID-DL-αCD3 ABD |
| 37 | iCID-DL-iCID-DL-Fc domain | αCD3-ABD-DL-Fc domain |
| 38 | iCID-DL-iCID-DL-Fc domain | Fc domain-DL-αCD3-ABD |
| 39 | Fc domain-DL-iCID-DL-iCID | αCD3-ABD-DL-Fc domain |
| 40 | Fc domain-DL-iCID-DL-iCID | Fc domain-DL-αCD3-ABD |

[0271] In some embodiments, the first CC fusion polypeptide may be iCID-DL-iCID-DL-Fc domain. In some embodiments, the first CC fusion polypeptide may be αCD3 ABD-DL-iCID-DL-iCID-DL-Fc domain. In some embodiments, the first CC fusion polypeptide may be iCID-DL-iCID-DL-αCD3 ABD-DL-Fc domain. In some embodiments, the first CC fusion polypeptide may be Fc domain-DL-iCID-DL-iCID. In some embodiments, the first CC fusion polypeptide may be Fc domain-DL-αCD3 ABD-DL-iCID-DL-iCID.

[0272] In some embodiments, the second CC fusion polypeptide may be iCID-DL-iCID-DL-Fc domain. In some embodiments, the second CC fusion polypeptide may be αCD3-ABD-DL-iCID-DL-iCID-DL-Fc domain. In some embodiments, the second CC fusion polypeptide may be iCID-DL-iCID-DL-αCD3-ABD-DL-Fc domain. In some embodiments, the second CC fusion polypeptide may be Fc domain-DL-iCID-DL-iCID. In some embodiments, the second CC fusion polypeptide may be Fc domain-DL-αCD3-ABD-DL-iCID-DL-iCID. In some embodiments, the second CC fusion polypeptide may be Fc domain-DL-iCID-DL-iCID-DL-αCD3-ABD.

[0273] As discussed herein, each of the iCID domains and αCD3 ABD domains of Table 4 can be selected from a Fab, an scFab, an scFvs or a single domain antibody such as the VHH of camelid derived single domain antibody. The Fc domains in the first CC fusion polypeptide and second CC fusion polypeptide heterodimerize with each other. The iCID domain(s) in the first CC fusion polypeptide and/or second CC fusion polypeptide can be selected from either half of the iCID domain pairs described herein. Exemplary formats are illustrated in FIGS. 12A-12G and 13A-13C.

[0274] In some embodiments, the CC binding proteins are CC homodimeric binding proteins that use standard Fc domains that self-assemble to form homodimers. In some embodiments, one of either of the iCID domain or the αCD3 ABD is formed using the VH and VL of a traditional, tetrameric antibody, and the other is attached to either the N- or C-terminus of the light chain or the N-terminus of the heavy chain. In some embodiments, one of either of the iCID domain or the αCD3 ABD is formed using the VH and VL of a traditional, tetrameric antibody, and the other is attached to C-terminus of Fc domain. For example, the iCID domain can take a Fab format, and the αCD3 ABD can take an scFv format attached to the C-terminus of the Fc domain. Alternatively, the αCD3 ABD can take a Fab format, and the iCID domain can take an scFv format attached to the C-terminus of the Fc domain. In some embodiments, both the iCID domain and the αCD3 ABD take the format of an scFv or scFab. From N- to C-terminal, the CC binding protein comprises iCID domain-optional domain linker-αCD3 ABD-optional domain linker-homodimeric Fc domain or αCD3 ABD-optional domain linker-iCID domain-optional domain linker-homodimeric Fc domain.

[0275] In some instances, the selected arrangements of domains of the dimeric CC binding protein employed in the T-LITE composition provide for an improvement, e.g. in synthesis, stability, affinity or effector function, over other structures disclosed herein or known in the art. In some cases, a 2-fold, 3-fold, or 4-fold increase in, e.g. synthesis, stability, affinity, or effector activity is observed. In some cases, a 5-fold, 6-fold, 7-fold, 8-fold, 9-fold, 10-fold or higher increase in, e.g. stability, affinity, or effector activity, is observed.

(iii) Useful CC Heterodimeric Binding Proteins

[0276] As discussed herein, useful CC heterodimeric binding proteins are generally shown in FIGS. 12A-12G and 13A-13C as discussed below. The CC heterodimeric binding protein may comprise a first CC fusion protein and a second CC fusion protein. The first CC fusion protein comprises one or more iCID domain linked to a first heterodimerization Fc domain via an optional domain linker. The second CC fusion protein comprises an αCD3 ABD linked to a second heterodimerization Fc domain via an optional domain linker. The first and second heterodimerization Fc domains heterodimerize to form the CC heterodimeric binding protein. In some embodiments, the first CC fusion protein comprises a plurality of iCIDs. In some embodiments, the first CC fusion protein comprises two iCIDs, for example, as depicted in FIG. 12G. In additional embodiments, each the two iCIDs comprises a indinavir-complex binding domain, for example, including, but not limited to, LS2B described herein.

[0277] The iCID domain and αCD3 ABD can take various formats including an Fab, an scFv, an scFab, and a single domain antibody as described herein above. In some embodiments, both the iCID domain and αCD3 ABD take the format of an scFv. In some embodiments, the iCID domain takes the format of an Fab and the αCD3 ABD take the format of an scFv as shown in FIG. 2. In some embodiments, the iCID domain takes the format of an scFab and the αCD3 ABD take the format of an scFv as shown in FIG. 3. In some embodiments, the iCID domain takes the format of a single domain antibody and the αCD3-ABD take the format of an scFv.

[0278] In some embodiments, the iCID domain takes the format of a Fab and the αCD3-ABD take the format of an Fab. In some embodiments, the iCID domain takes the format of an scFab and the αCD3 ABD take the format of an Fab. In some embodiments, the iCID domain takes the format of an scFv and the αCD3 ABD take the format of an Fab. In some embodiments, the iCID domain takes the format of a single domain antibody and the αCD3 ABD take the format of a Fab.

[0279] In some embodiments, the iCID domain takes the format of an Fab and the αCD3-ABD take the format of an scFab. In some embodiments, the iCID domain takes the format of an scFab and the αCD3 ABD take the format of an scFab. In some embodiments, the iCID domain takes the format of an scFv and the αCD3 ABD take the format of an scFab. In some embodiments, the iCID domain takes the format of a single domain antibody and the αCD3 ABD take the format of an scFab.

[0280] In some embodiments, the iCID domain takes the format of an Fab and the αCD3-ABD take the format of a single domain antibody. In some embodiments, the iCID domain takes the format of an scFab and the αCD3 ABD take the format of a single domain antibody. In some embodiments, the iCID domain takes the format of an scFv and the αCD3 ABD take the format of a single domain antibody. In some embodiments, the iCID domain takes the format of a single domain antibody and the αCD3 ABD take the format of a single domain antibody.

[0281] In another aspect, the CC heterodimeric binding proteins comprises a Fc fusion protein and an empty Fc domain. The Fc fusion protein comprises one or more iCID domain, an αCD3 ABD, a first heterodimerization Fc domain and one or more optional linkers. The empty Fc domain contains a second heterodimerization Fc domain which heterodimerizes with the first heterodimerization Fc domain. The iCID domain and αCD3 ABD can take various formats including an Fab, an scFv, an scFab, or a single domain antibody as described herein above. In some embodiments, the iCID takes the Fab format, and the αCD3 ABD takes the format of an Fab, an scFv, an scFab, or a single domain antibody. In some embodiments, the iCID takes the scFab format, and the αCD3 ABD takes the format of an Fab, an scFv, an scFab, or a single domain antibody. In some embodiments, the iCID takes the scFv format, and the αCD3 ABD takes the format of an Fab, an scFv, an scFab, or a single domain antibody. In some embodiments, the iCID takes the single domain antibody format, and the αCD3 ABD takes the format of an Fab, an scFv, an scFab, or a single domain antibody. From N to C terminus, the Fc fusion protein can have configurations, such as iCID domain-optional domain linker-αCD3 ABD-optional domain linker-Fc, first iCID domain-optional domain linker-second iCID domain-optional domain linker-αCD3 ABD-optional domain linker-Fc, αCD3 ABD-optional domain linker-iCID domain-optional domain linker-Fc, αCD3 ABD-optional domain linker-first iCID domain-optional domain linker-second iCID domain-optional domain linker-Fc, αCD3 ABD-optional domain linker-Fc-optional domain linker-iCID domain, αCD3 ABD-optional domain linker-Fc-optional domain linker-first iCID domain-optional domain linker-second iCID domain, iCID domain-optional domain linker-Fc-optional domain linker-αCD3 ABD, and first iCID domain-optional domain linker-second iCID domain-optional domain linker-Fc-optional domain linker-αCD3 ABD. Further, from N to C terminus, the Fc fusion protein can have configurations, such as Fc-linker-iCID domain-optional domain linker-CD3 ABD, Fc-optional domain linker-CD3 ABD-optional domain linker-iCID domain, iCID domain-optional domain linker-Fc-liker-CD3 ABD, Fc-optional domain linker-first iCID domain-optional linker-second iCID domain-optional linker-CD3 ABD, Fc-Linker-CD3 ABD-optional domain linker-first iCID domain-optional domain linker-second iCID domain, and first iCID domain-optional domain linker-second iCID domain-optional domain linker-Fc-liker-CD3 ABD. Additionally, from N to C terminus, the Fc fusion protein can have configurations, such as iCID domain-optional domain linker-Fc, Fc-optional domain linker-iCID domain, CD3 ABD-optional domain linker-Fc, Fc-optional domain linker-CD3 ABD, first iCID domain-optional domain linker-Fc-optional domain linker-second iCID domain, first iCID domain-optional domain linker-second iCID domain-optional domain linker-Fc, Fc-optional domain linker-first iCID domain-optional domain linker-second iCID domain, CD3 ABD-optional domain linker-Fc, Fc-optional domain linker-CD3 ABD, first iCID domain-optional domain linker-second iCID domain-optional domain linker-Fc, and Fc-optional domain linker first iCID domain-optional domain linker-second iCID domain. The first and second iCID domains may be identical.

[0282] In one aspect, a composition described herein comprises a CC heterodimeric binding protein comprising; i) a first CC fusion protein comprising: 1) a first indinavir chemically induced dimerization (iCID) domain; 2) an optional linker; and 3) a first heterodimerization Fc domain; and ii) a second CC fusion protein comprising: 1) an anti-CD3 antigen binding domain (ABD; αCD3-ABD); 2) an optional domain linker, and 3) a second heterodimerization Fc domain. In some embodiments, the first CC fusion protein may further comprise a second iCID domain linked to the first iCID domain via an optional linker. The first and second iCID domains may be identical.

[0283] In one aspect, a composition described herein comprises a monomeric CC binding protein comprising: a) a first indinavir chemically induced dimerization (iCID) domain; b) an optional domain linker; c) an IgG4 monomeric Fc domain; d) an optional domain linker; and e) an anti-CD3 antigen binding domain (ABD; αCD3-ABD). In some embodiments, the monomeric CC binding protein may further comprise a second iCID domain linked to the first iCID domain via an optional linker. The first and second iCID domains may be identical.

[0284] In one aspect, a composition described herein comprises a) a first CC fusion protein comprising: 1) a first indinavir chemically induced dimerization (iCID) domain; 2) an optional domain linker; 3) an αCD3-ABD; and 4) a first heterodimerization Fc domain; and ii) a second CC fusion protein comprising: 1) a second heterodimerization Fc domain. In some embodiments, the first CC fusion protein may further comprise a second iCID domain linked to the first iCID domain via an optional linker. The first and second iCID domains may be identical.

[0285] In some embodiments, the first iCID domain may comprise a composition comprising an indinavir binding domain. In some embodiments, the first iCID domain may comprise a composition comprising an indinavir-complex binding domain. In some embodiments, the composition comprises one or more heavy chain and/or light chain sequences selected from the group consisting of heavy chain and/or light chain sequences from FIGS. 9A and 9B. In some embodiments, the composition comprises any one of CC heterodimeric binding proteins of FIGS. 9A and 9B. FIG. 9A depicts exemplary CC heterodimeric binding proteins with one iCID domain. In some embodiments, the composition comprises Ab0382 of FIG. 9A. In some embodiments, the composition comprises Ab00383 of FIG. 9A. In some embodiments, the composition comprises Ab0432 of FIG. 9A. In some embodiments, the composition comprises Ab0644 of FIG. 9A. FIG. 9B depicts exemplary CC heterodimeric binding proteins with two iCID domains, each comprising an indinavir binding domain. In some embodiments, the composition comprises Ab0649 of FIG. 9B. In some embodiments, the composition comprises Ab0684 of FIG. 9B. In some embodiments, the composition comprises Ab0685 of FIG. 9B. In some embodiments, the composition comprises Ab0686 of FIG. 9B. In some embodiments, the composition comprises Ab0779 of FIG. 9B. In some embodiments, the composition comprises Ab0904 of FIG. 9B. In some embodiments, the composition comprises Ab0905 of FIG. 9B. In some embodiments, the composition comprises Ab0906 of FIG. 9B. In some embodiments, the composition comprises Ab1060 of FIG. 9B. In some embodiments, the composition comprises Ab1063 of FIG. 9B. In some embodiments, the composition comprises Ab1064 of FIG. 9B. In some embodiments, the composition comprises Ab1091 of FIG. 9B. In some embodiments, the composition comprises Ab1133 of FIG. 9B. In some embodiments, the composition comprises Ab1134 of FIG. 9B. In some embodiments, the composition comprises Ab1135 of FIG. 9B. In some embodiments, the composition comprises Ab1136 of FIG. 9B. In some embodiments, the composition comprises Ab1137 of FIG. 9B.

[0286] In another aspect, said first iCID domain is an indinavir binding domain comprising: i) a variable heavy (VH) domain comprising a vhCDR1, vhCDR2, and vhCDR3 sequence; ii) a variable light (VL) domain comprising a vlCDR1, vlCDR2, and vlCDR3 sequence; wherein said vhCDR1, vhCDR2 and vhCDR3 sequences and said vlCDR1, vlCDR2, and vlCDR3 sequences are selected from the group consisting of the vhCDR1, vhCDR2 and vhCDR3 sequences and the vlCDR1, vlCDR2, and vlCDR3 sequences from P7-F7, P7-E7, PS-HS, P2-D8, P3-E12, P6-C8, P7-G8, P6-D7, P6-DS, P3-A11, PS-C3, P3-HS, P7-H10, P7-C6, P2-C2, P2-E8, PS-E9, P3-H7, P7-D6, P6-D11, PS-A9, P4-C5, P3-H2, P1-H3, P1-B12, P4-G12, P2-A10, P4-D11, P7-D12, P1-C11, P4-F9, P6-HS, P2-D7, P3-FS, P3-C5, P8-F4, P8-C2, P7-F12, P2-H7, P1-B7, P2-D9, P6-E8, P3-B9, P1-G1, P1-D11, P8-E3, P4-E4, PS-D12, P3-F4, P6-H2, P1-E9, P8-D9, and P4-G11 (FIG. 50). In another aspect, said first iCID domain is an indinavir binding domain comprising a VH domain and VL domain selected from the group consisting of the VH and VL domains of P7-F7, P7-E7, PS-HS, P2-D8, P3-E12, P6-C8, P7-G8, P6-D7, P6-DS, P3-A11, PS-C3, P3-HS, P7-H10, P7-C6, P2-C2, P2-E8, PS-E9, P3-H7, P7-D6, P6-D11, PS-A9, P4-C5, P3-H2, P1-H3, P1- B12, P4-G12, P2-A10, P4-D11, P7-D12, P1-C11, P4-F9, P6-HS, P2-D7, P3-FS, P3-C5, P8-F4, P8-C2, P7-F12, P2-H7, P1-B7, P2-D9, P6-E8, P3-B9, P1-G1, P1-D11, P8-E3, P4-E4, PS-D12, P3-F4, P6-H2, P1-E9, P8-D9, and P4-G11 (FIG. 50). In another aspect, said first iCID is an indinavir-complex binding domain comprising: i) a variable heavy (VH) domain comprising a vhCDR1, vhCDR2, and vhCDR3 sequence; ii) a variable light (VL) domain comprising a vlCDR1, vlCDR2, and vlCDR3 sequence; wherein said vhCDR1, vhCDR2 and vhCDR3 sequences and said vlCDR1, vlCDR2, and vlCDR3 sequences are selected from the group consisting of the vhCDR1, vhCDR2 and vhCDR3 sequences and the vlCDR1, vlCDR2, and vlCDR3 sequences from Fab001, Fab002, Fab003, Fab004, Fab005, Fab006, Fab007, Fab008, Fab009, Fab0010, Fab0011, Fab0012, Fab0013, Fab0014, Fab0015, Fab0016, Fab0017, Fab0018, Fab0019, Fab0020, Fab0021, and Fab0022 (FIG. 50). In another aspect, said first iCID is an indinavir-complex binding domain comprising a VH domain and VL domain selected from the group consisting of the VH and VL domains of Fab001, Fab002, Fab003, Fab004, Fab005, Fab006, Fab007, Fab008, Fab009, Fab0010, Fab0011, Fab0012, Fab0013, Fab0014, Fab0015, Fab0016, Fab0017, Fab0018, Fab0019, Fab0020, Fab0021, and Fab0022 (FIG. 50).

b. CT Binding Proteins

[0287] Similar to CC binding proteins, the invention provides CT binding proteins. Each CT binding protein contains an iCID domain, and an anti-TTABD (αTTABD). In some embodiments, CT binding proteins do not contain an Fc domain, such as direct fusion of an iCID domain and an αTTABD. Both the iCID domain and the αTTABD can take the format of an scFv, a Fab, an scFab or a single domain antibody such as the VHH of camelid derived single domain antibody. In some embodiments, CT binding proteins contain an Fc domain. In some cases, CT binding proteins rely on the use of a monomeric Fc domain, such that the CT binding proteins are monomeric, as more fully outlined below. In some embodiments, CT binding proteins comprise a first and a second CT fusion polypeptide, that come together as dimers, either heterodimerically or homodimerically, to provide the αTTAABD functionally coupled to an iCID domain.

### (i) Monomeric CT Fusion Polypeptides

[0288] Accordingly, when the CT binding protein relies on the use of a monomeric IgG4 Fc domain, the CT binding protein is a fusion polypeptide with a structure selected from the group, from N- to C-terminal: iCID domain-optional domain linker-αTTABD-optional domain linker-Fc domain; iCID domain-optional domain linker-first αTTABD-optional domain linker-second αTTABD-optional domain linker-Fc domain; αTTABD-optional domain linker-iCID domain-optional domain linker-Fc domain; first αTTABD-optional domain linker-second αTTABD-optional domain linker-iCID domain-optional domain linker-Fc domain; iCID domain-optional domain linker-Fc domain-optional domain linker-αTTABD; iCID domain-optional domain linker-Fc domain-optional domain linker-first αTTABD-optional domain linker-second αTTABD; αTTABD-optional domain linker-iCID domain-optional domain linker-Fc domain; first αTTABD-optional domain linker-second αTTABD-optional domain linker-iCID domain-optional domain linker-Fc domain; Fc domain-optional domain linker-αTAABD-optional domain linker-iCID domain; and Fc domain-optional domain linker-first αTAABD-optional domain linker-second αTAABD-optional domain linker-iCID domain and Fc domain-optional domain linker-iCID domain-optional domain linker-αTTABD. Either or both of the iCID and αTTABD can take any one of the formats including a Fab, an scFv, an scFab, and a single domain antibody such as the VHH of camelid derived single domain antibody. The first and second αTTABDs may be identical. In some embodiments, the first and second αTTABDs are different.

[0289] In some instances, the selected arrangements of domains of the monomeric CT binding protein employed in the T-LITE composition provide an improvement, e.g., in synthesis, stability, affinity or effector activity, over other structures disclosed herein or known in the art. In some cases, a 2-fold, 3-fold, or 4-fold increase in, e.g. synthesis, stability, affinity, or effector function is observed. In some cases, a 5-fold, 6-fold, 7-fold, 8-fold, 9-fold, 10-fold or higher increase in, e.g. stability, affinity, or effector function, is observed.

### (ii) Dimeric CT Binding Proteins

[0290] In some embodiments, the CT binding protein comprises a first and a second CT fusion polypeptide, that come together as dimers, either heterodimerically or homodimerically, to provide the αTAABD functionally coupled to a CID domain. In these embodiments, the CT binding proteins rely on the use of Fc domains that are dimers, either heterodimeric Fc domains or homodimeric Fc domains.

[0291] In some embodiments, the CT binding proteins are CT heterodimeric binding proteins that use heterodimerization variants in the Fc domains. Thus, in some embodiments, the CT binding protein comprises a first and a second CT fusion polypeptide, wherein one of the first and second CT fusion polypeptides contains the αTAABD and the other the iCID domain. In some embodiments, the CT binding protein comprises a first CT fusion polypeptide which contains both the αTAABD and the iCID domain, and a second CT fusion polypeptide comprising an empty Fc domain. In these embodiments, the first and second CT fusion polypeptides can have the structures (from N- to C-terminal, with “DL” standing for “domain linker”) as shown in Table 5. In some embodiments, each of the CT fusion polypeptide having one αTAABD may further comprise another αTAABD linked to the αTAABD via an optional DL, for example, as shown in 37-40 in Table 4 below. The iCID domains in the same fusion polypeptide may be identical. In some embodiments, the iCID domains in the same fusion polypeptide may be different. In some embodiments, each of the CT fusion polypeptide having one iCID domains may further comprise another iCID domain linked to the iCID domain via an optional DL, for example, as shown in 41-44 in Table 4 below. The iCID domains in the same fusion polypeptide may be identical. In some embodiments, the iCID domains in the same fusion polypeptide may be different. The DLs in the same fusion polypeptide may be different. In some embodiments, the DLs in the same fusion polypeptide may be same.

TABLE 5

| | First CT fusion polypeptide | Second CT fusion polypeptide |
|---|---|---|
| | (N- to C- terminal) | (N- to C- terminal) |
| 1 | Fc domain | iCID-DL-Fc domain |
| 2 | Fc domain | αTAABD-DL-Fc domain |
| 3 | Fc domain | αTAABD-DL-iCID-DL-Fc domain |
| 4 | Fc domain | iCID-DL-αTAABD-DL-Fc domain |
| 5 | Fc domain | Fc domain-DL-iCID |
| 6 | Fc domain | Fc domain-DL-αTAABD |
| 7 | Fc domain | Fc domain-DL-αTAABD-DL-iCID |
| 8 | Fc domain | Fc domain-DL-iCID-DL-αTAABD |
| 9 | iCID-DL-Fc domain | αTAABD-DL-Fc domain |
| 10 | iCID-DL-Fc domain | αTAABD-DL-iCID-DL-Fc domain |
| 11 | iCID-DL-Fc domain | iCID-DL-αTAABD-DL-Fc domain |
| 12 | iCID-DL-Fc domain | Fc domain-DL-iCID |
| 13 | iCID-DL-Fc domain | Fc domain-DL-αTAABD |
| 14 | iCID-DL-Fc domain | Fc domain-DL-αTAABD-DL-iCID |
| 15 | iCID-DL-Fc domain | Fc domain-DL-iCID-DL-αTAABD |
| 16 | αTAABD-DL-Fc domain | αTAABD-DL-iCID-DL-Fc domain |
| 17 | αTAABD-DL-Fc domain | iCID-DL-αTAABD-DL-Fc domain |
| 18 | αTAABD-DL-Fc domain | Fc domain-DL-iCID |
| 19 | αTAABD-DL-Fc domain | Fc domain-DL-αTAABD |
| 20 | αTAABD-DL-Fc domain | Fc domain-DL-αTAABD-DL-iCID |
| 21 | αTAABD-DL-Fc domain | Fc domain-DL-iCID-DL-αTAABD |
| 22 | αTAABD-DL-iCID-DL-Fc domain | iCID-DL-αTAABD-DL-Fc domain |
| 23 | αTAABD-DL-iCID-DL-Fc domain | Fc domain-DL-iCID |
| 24 | αTAABD-DL-iCID-DL-Fc domain | Fc domain-DL-αTAABD |
| 25 | αTAABD-DL-iCID-DL-Fc domain | Fc domain-DL-αTAABD-DL-iCID |
| 26 | αTAABD-DL-iCID-DL-Fc domain | Fc domain-DL-iCID-DL-αTAABD |
| 27 | iCID-DL-αTAABD-DL-Fc domain | Fc domain-DL-iCID |
| 28 | iCID-DL-αTAABD-DL-Fc domain | Fc domain-DL-αTAABD |
| 29 | iCID-DL-αTAABD-DL-Fc domain | Fc domain-DL-αTAABD-DL-iCID |
| 30 | iCID-DL-αTAABD-DL-Fc domain | Fc domain-DL-iCID-DL-αTAABD |
| 31 | Fc domain-DL-iCID | Fc domain-DL-αTAABD |
| 32 | Fc domain-DL-iCID | Fc domain-DL-αTAABD-DL-iCID |
| 33 | Fc domain-DL-iCID | Fc domain-DL-iCID-DL-αTAABD |
| 34 | Fc domain-DL-αTAABD | Fc domain-DL-αTAABD-DL-iCID |
| 35 | Fc domain-DL-αTAABD | Fc domain-DL-iCID-DL-αTAABD |
| 36 | Fc domain-DL-αTAABD-DL-iCID | Fc domain-DL-iCID-DL-αTAABD |
| 37 | iCID-DL- Fc domain | αTAABD -DL-αTAABD-DL-Fc domain |
| 38 | iCID-DL- Fc domain | Fc domain-DL- αTAABD-DL- αTAABD |
| 39 | Fc domain-DL-iCID | αTAABD -DL-αTAABD-DL-Fc domain |
| 40 | Fc domain-DL-iCID | Fc domain-DL- αTAABD-DL- αTAABD |
| 41 | iCID-DL-iCID-DL-Fc domain | αTAABD -DL-Fc domain |
| 42 | iCID-DL-iCID-DL-Fc domain | Fc domain-DL- αTAABD |
| 43 | Fc domain-DL-iCID-DL-iCID | αTAABD -DL-Fc domain |
| 44 | Fc domain-DL-iCID-DL-iCID | Fc domain-DL-αTAABD |
| 45 | iCID-DL-iCID-DL-Fc domain | αTAABD -DL-αTAABD-DL-Fc domain |
| 46 | iCID-DL-iCID-DL-Fc domain | Fc domain-DL- αTAABD-DL- αTAABD |
| 47 | Fc domain-DL-iCID-DL-iCID | αTAABD -DL-αTAABD-DL-Fc domain |
| 48 | Fc domain-DL-iCID-DL-iCID | Fc domain-DL- αTAABD-DL- αTAABD |
| 49 | iCID-DL-Fc domain | αTAABD-DL- αTAABD-DL Fc domain |
| 50 | iCID-DL-Fc domain | αTAABD-DL- αTAABD-DL iCID-DL- |
| | | Fc domain |
| 51 | iCID-DL-Fc domain | iCID-DL-αTAABD-DL- αTAABD-DL |
| | | Fc domain |
| 53 | iCID-DL-Fc domain | Fc domain-DL-αTAABD-DL-αTAABD |
| 54 | iCID-DL-Fc domain | Fc domain-DL-αTAABD-DL-αTAABD - |
| | | DL-iCID |
| 55 | iCID-DL-Fc domain | Fc domain-DL-iCID-DL-αTAABD-DL- |
| | | αTAABD |
| 56 | Fc domain-DL-iCID-DL-iCID | αTAABD -DL- αTAABD -DL-Fc |
| | | domain |
| 57 | Fc domain-DL-iCID-DL-iCID | Fc domain-DL-αTAABD-DL-αTAABD |
| 58 | Fc domain-DL-iCID | Fc domain-DL-αTAABD-DL-αTAABD |
| 59 | Fc domain-DL-iCID | Fc domain-DL-αTAABD-DL-αTAABD - |
| | | DL-iCID |
| 60 | Fc domain-DL-iCID | Fc domain-DL-iCID-DL-αTAABD-DL- |
| | | αTAABD |

[0292] In some embodiments, the first CC fusion polypeptide may be iCID-DL-iCID-DL-Fc domain. In some embodiments, the first CC fusion polypeptide may be αTAABD-DL-iCID-DL-iCID-DL-Fc domain. In some embodiments, the first CC fusion polypeptide may be iCID-DL-iCID-DL-αTAABD-DL-Fc domain. In some embodiments, the first CC fusion polypeptide may be Fc domain-DL-iCID-DL-iCID. In some embodiments, the first CC fusion polypeptide may be Fc domain-DL-αTAABD-DL-iCID-DL-iCID.

[0293] In some embodiments, the second CC fusion polypeptide may be iCID-DL-iCID-DL-Fc domain. In some embodiments, the second CC fusion polypeptide may be αCD3-ABD-DL-iCID-DL-iCID-DL-Fc domain. In some embodiments, the second CC fusion polypeptide may be iCID-DL-iCID-DL-αCD3-ABD-DL-Fc domain. In some embodiments, the second CC fusion polypeptide may be Fc domain-DL-iCID-DL-iCID. In some embodiments, the second CC fusion polypeptide may be Fc domain-DL-αCD3-ABD-DL-iCID-DL-iCID. In some embodiments, the second CC fusion polypeptide may be Fc domain-DL-iCID-DL-iCID-DL-αCD3-ABD.

[0294] As discussed herein, each of the iCID domains and αTAABD domains of Table 5 can be selected from a Fab, an scFab, an scFvs or a single domain antibody such as the VHH of camelid derived single domain antibody. The Fc domains in the first CT fusion polypeptide and second CT fusion polypeptide heterodimerize with each other. The iCID domain(s) in the first CT fusion polypeptide and/or second CT fusion polypeptide can be selected from either half of the iCID domain pairs described herein.

[0295] In some instances, the selected arrangements of domains of the dimeric CT binding protein employed in the T-LITE composition provide an improvement, e.g. in synthesis, stability, affinity or effector function, over other structures disclosed herein or known in the art. In some cases, a 2-fold, 3-fold, or 4-fold increase in, e.g. synthesis, stability, affinity, or effector activity is observed. In some cases, a 5-fold, 6-fold, 7-fold, 8-fold, 9-fold, 10-fold or higher increase in, e.g. stability, affinity, or effector activity, is observed.

[0296] In some embodiments, the CT binding proteins are CT homodimeric binding proteins that use standard Fc domains that self-assemble to form homodimers. In some embodiments, one of either of the iCID domain or the αTTABD is formed using the VH and VL of a traditional, tetrameric antibody, and the other is attached to either the N- or C-terminus of the light chain or the C-terminus of the heavy chain. In some embodiments, the iCID domain takes a Fab format, and the αTTABD takes an scFv format. Alternatively, the αTTABD can take a Fab format, and the iCID domain can take an scFv format attached to either the N- or C-terminus of the light chain or the C-terminus of the heavy chain of the αTTABD.

[0297] In some embodiments, one of either of the iCID domain or the αTTABD is formed using the VH and VL of a traditional, tetrameric antibody, and the other is attached to C-terminus of Fc domain. In some embodiments, the iCID domain takes a Fab format, and the αTTABD takes an scFv format. Alternatively, the αTTABD can take a Fab format, and the iCID domain can take an scFv format attached to the C-terminus of the Fc domain.

[0298] In some embodiments, both the iCID domain and the αTTABD take the format of an scFv or scFab. From N- to C-terminal, the CT binding protein comprises iCID domain-αTTABD-homodimeric Fc domain or αTTABD-iCID domain-homodimeric Fc domain.

(iii) Useful CT Heterodimeric Binding Proteins

[0299] In one aspect, the CT heterodimeric binding proteins comprising a iCID domain and αTTABD comprise two fusion proteins, for example, including, but not limited to, those depicted in FIGS. 14A-14E. The first CT fusion protein comprises one or more iCID domain linked to a first heterodimerization Fc domain via an optional domain linker. The second CT fusion protein comprises an αTTABD linked to a second heterodimerization Fc domain via an optional domain linker. The first and second heterodimerization Fc domains heterodimerize to form the CT heterodimeric binding protein. In some embodiments, the first CT fusion protein comprises a plurality of iCIDs. In some embodiments, the first CT fusion protein comprises two iCIDs, for example, as depicted in FIG. 14C. In additional embodiments, each of the two iCIDs comprises an indinavir binding domain. In some embodiments, the second CT fusion protein comprises a plurality of αTTABD. In some embodiments, the second CT fusion protein comprises two αTTABD, for example, as depicted in FIGS. 14C and 14D.

[0300] In some embodiments, the iCID domain is linked to the N terminus of the first heterodimerization Fc domain and the αTTABD is linked to the N terminus of the second heterodimerization Fc domain. In some embodiments, the iCID domain is linked to the N terminus of the first heterodimerization Fc domain and the αTTABD is linked to the C terminus of the second heterodimerization Fc domain. In some embodiments, the iCID domain is linked to the C terminus of the first heterodimerization Fc domain and the αTTABD is linked to the N terminus of the second heterodimerization Fc domain.

[0301] The iCID domain and αTTABD can take various formats including a Fab, an scFv, an scFab, and a single domain antibody as described herein above. In some embodiments, both the iCID domain and αTTABD take the format of an scFv. In some embodiments, the iCID domain takes the format of a Fab and the αTTABD take the format of an scFv. In some embodiments, the iCID domain takes the format of an scFab and the αTTABD takes the format of an scFv. In some embodiments, the iCID domain takes the format of a single domain antibody and the αTTABD take the format of an scFv.

[0302] In some embodiments, the iCID domain takes the format of a Fab and the αTTABD take the format of n Fab. In some embodiments, the iCID domain takes the format of a scFab and the αTTABD take the format of a Fab. In some embodiments, the iCID domain takes the format of a scFv and the αTTABD take the format of a Fab. In some embodiments, the iCID domain takes the format of a single domain antibody and the αTTABD take the format of a Fab.

[0303] In some embodiments, the iCID domain takes the format of a Fab and the αCD3-ABD take the format of an scFab. In some embodiments, the iCID domain takes the format of an scFab and the αTTABD take the format of an scFab. In some embodiments, the iCID domain takes the format of an scFv and the αTTABD take the format of an scFab. In some embodiments, the iCID domain takes the format of a single domain antibody and the αTTABD take the format of an scFab.

[0304] In some embodiments, the iCID domain takes the format of an Fab and the αTTABD take the format of a single domain antibody. In some embodiments, the iCID domain takes the format of an scFab and the αTTABD take the format of a single domain antibody. In some embodiments, the iCID domain takes the format of an scFv and the αTTABD take the format of a single domain antibody. In some embodiments, the iCID domain takes the format of a single domain antibody and the αTTABD take the format of a single domain antibody.

[0305] In another aspect, the CT heterodimeric binding proteins comprise an iCID domain and two αTTABDs. The two αTTABDs can bind to the same tumor antigen or two different tumor antigens. Advantages of this format can include conferring increased potency to target tumor antigens (TAs) due to increased avidity provided by the two tumor antigen binders. Further, in some embodiments, a TTABD with a lower affinity can be used in this format to increase selectivity of a CT binding protein. Use of multivalent interactions can favor association of a CT binding protein with cells expressing high levels of a TA. Therefore, in some instances, selectivity for high-UA expressing tumor cells can be achieved over healthy tissue expressing lower levels of the TTA. As such, using this format can lower potential side effects of a T-LITE. The first CT fusion protein comprises an iCID domain, an αTTABD, a first heterodimerization Fc domain and optional domain linkers. The second CT fusion protein comprises the other αTTABD linked to a second heterodimerization Fc domain via an optional domain linker. From the N to C terminus, the first CT fusion protein can take various configurations such as αTTABD-optional domain linker-iCID-optional domain linker-Fc, αTTABD-optional domain linker-αTTABD-optional domain linker-iCID-optional domain linker-Fc, iCID-optional domain linker-αTTABD-optional domain linker-Fc, αTTABD-optional domain linker-Fc-optional domain linker-iCID, iCID-optional domain linker-αTTABD-optional domain linker-αTTABD-optional domain linker-Fc, αTTABD-optional domain linker-Fc-optional domain linker-iCID, CID-optional domain linker-Fc-optional domain linker-αTTABD, CID-optional domain linker-Fc-optional domain linker-αTTABD-optional domain linker-αTTABD, Fc-optional domain linker-iCID-optional domain linker-αTTABD, Fc-optional domain linker-iCID-optional domain linker-αTTABD-optional domain linker-αTTABD, Fc-optional domain linker-αTTABD-optional domain linker-iCID, and Fc-optional domain linker-αTTABD-optional domain linker-αTTABD-optional domain linker-iCID. In the second CT fusion protein, the αTTABD can be linked to the N or C terminus of the second heterodimerization Fc domain. The first and second heterodimerization Fc domains heterodimerize to form the CT heterodimeric binding protein. The iCID domain and αTTABD can take various formats including a Fab, an scFv, an scFab, and a single domain antibody as described herein above.

[0306] In another aspect, the CT heterodimeric binding proteins comprise a Fc fusion protein and an empty Fc domain. The Fc fusion protein comprises a iCID domain, an αTTABD and a first heterodimerization Fc domain. The empty Fc domain contains a second heterodimerization Fc domain which heterodimerizes with the first heterodimerization Fc domain. The iCID domain and αTTABD can take various formats including a Fab, an scFv, an scFab, and a single domain antibody as described herein above. In some embodiments, the Fc fusion protein may further comprise a second αTTABD linked to the αTTABD via an optional linker. The αTTABD domains in the fusion protein may be identical. From N terminal to C terminal, the Fc fusion protein can have configurations such as iCID-optional domain linker-αTTABD-optional domain linker-Fc, iCID-optional domain linker-αTTABD-optional domain linker-αTTABD-optional domain linker-Fc, αTTABD-optional domain linker-iCID-optional domain linker-Fc, αTTABD-optional domain linker-αTTABD-optional domain linker-iCID-optional domain linker-Fc, αTTABD-optional domain linker-Fc-optional domain linker-iCID, αTTABD-optional domain linker-αTTABD-optional domain linker-Fc-optional domain linker-iCID, iCID-optional domain linker-Fc-optional domain linker-αTTABD, and iCID-optional domain linker-Fc-optional domain linker-αTTABD-optional domain linker-αTTABD. In some embodiments, the Fc fusion protein may further comprise a third iCID domain linked to the second iCID domain via an optional linker. The iCID domains in the fusion protein may be identical.

[0307] In one aspect, a composition of the present disclosure comprises a CT heterodimeric binding protein comprising: a) a first CT fusion protein comprising: 1) a second iCID domain; 2) an optional domain linker, and 3) a first heterodimerization Fc domain; and b) a second CT fusion protein comprising: 1) a first anti-tumor targeting ABD (αTTABD); 2) an optional domain linker, and 3) a second heterodimerization Fc domain. In some embodiments, the first CT fusion protein may further comprise a third iCID domain linked to the second iCID domain via an optional linker. The iCID domains may be identical. In some embodiments, the second CT fusion protein may further comprise a second αTTABD linked to the first αTTABD via an optional linker. The αTTABDs may be identical.

[0308] In one aspect, a composition of the present disclosure comprises a monomeric CT binding polypeptide comprising: a) a second indinavir chemically induced dimerization (iCID) domain; b) an optional domain linker(s); c) an IgG4 monomeric Fc domain; and d) an anti-tumor targeting ABD (αTTABD). In some embodiments, the monomeric CT binding polypeptide may further comprise a third iCID domain linked to the second iCID domain via an optional linker. The iCID domains may be identical. In some embodiments, the monomeric CT binding polypeptide may further comprise a second αTTABD linked to the first αTTABD via an optional linker. The αTTABDs may be identical.

[0309] In some embodiments, the anti-tumor targeting antigen may be EpCAM. In some embodiments, the αTTABD may comprise the composition comprising the EpCAM binding domain described herein.

[0310] In some embodiments, the first iCID domain may comprise a composition comprising an indinavir binding domain. In some embodiments, the first iCID domain may comprise a composition comprising an indinavir-complex binding domain. In some embodiments, the composition may comprise one or more heavy chain and/or light chain sequences selected from the group consisting of heavy chain and/or light chain sequences from FIGS. 9C and 9D. In some embodiments, the composition comprises any one of CT heterodimeric binding proteins of FIGS. 9C and 9D. In some embodiments, the composition comprises Ab0386 of FIG. 9C. In some embodiments, the composition comprises Ab0439 of FIG. 9C. In some embodiments, the composition comprises Ab0642 of FIG. 9C. In some embodiments, the composition comprises Ab0643 of FIG. 9C. In some embodiments, the composition comprises Ab0778 of FIG. 9C. In some embodiments, the composition comprises Ab0794 of FIG. 9C. In some embodiments, the composition comprises Ab0795 of FIG. 9C. In some embodiments, the composition comprises Ab0796 of FIG. 9C. In some embodiments, the composition comprises Ab1059 of FIG. 9C. In some embodiments, the composition comprises Ab1068 of FIG. 9C. In some embodiments, the composition comprises Ab1069 of FIG. 9C. In some embodiments, the composition comprises Ab1088 of FIG. 9C. In some embodiments, the composition comprises Ab1089 of FIG. 9C. In some embodiments, the composition comprises Ab1090 of FIG. 9C. In some embodiments, the composition comprises Ab1093 of FIG. 9C. In some embodiments, the composition comprises Ab1094 of FIG. 9C. In some embodiments, the composition comprises Ab1101 of FIG. 9C. In some embodiments, the composition comprises Ab1102 of FIG. 9C. In some embodiments, the composition comprises Ab1111 of FIG. 9C. In some embodiments, the composition comprises Ab1114 of FIG. 9C. In some embodiments, the composition comprises Ab1117 of FIG. 9C. In some embodiments, the composition comprises Ab1121 of FIG. 9C. In some embodiments, the composition comprises Ab1126 of FIG. 9C. In some embodiments, the composition comprises Ab1147 of FIG. 9C. In some embodiments, the composition comprises Ab1148 of FIG. 9C. In some embodiments, the composition comprises Ab1149 of FIG. 9C. In some embodiments, the composition comprises Ab1150 of FIG. 9C. In some embodiments, the composition comprises Ab1151 of FIG. 9C. In some embodiments, the composition comprises Ab1152 of FIG. 9C. In some embodiments, the composition comprises Ab0650 of FIG. 9D. In some embodiments, the composition comprises Ab0651 of FIG. 9D. In some embodiments, the composition comprises Ab0652 of FIG. 9D. In some embodiments, the composition comprises Ab0789 of FIG. 9D. In some embodiments, the composition comprises Ab0790 of FIG. 9D. In some embodiments, the composition comprises Ab1153 of FIG. 9D.

[0311] In another aspect, said second iCID domain is an indinavir binding domain comprising: i) a variable heavy (VH) domain comprising a vhCDR1, vhCDR2, and vhCDR3 sequence; ii) a variable light (VL) domain comprising a vlCDR1, vlCDR2, and vlCDR3 sequence; wherein said vhCDR1, vhCDR2 and vhCDR3 sequences and said vlCDR1, vlCDR2, and vlCDR3 sequences are selected from the group consisting of the vhCDR1, vhCDR2 and vhCDR3 sequences and the vlCDR1, vlCDR2, and vlCDR3 sequences from P7-F7, P7-E7, P5-H5, P2-D8, P3-E12, P6-C8, P7-G8, P6-D7, P6-D5, P3-All, P5-C3, P3-H5, P7-H10, P7-C6, P2-C2, P2-E8, P5-E9, P3-H7, P7-D6, P6-D11, P5-A9, P4-C5, P3-H2, P1-H3, P1-B12, P4-G12, P2-A10, P4-D11, P7-D12, P1-C11, P4-F9, P6-H5, P2-D7, P3-F5, P3-C5, P8-F4, P8-C2, P7-F12, P2-H7, P1-B7, P2-D9, P6-E8, P3-B9, P1-G1, P1-D11, P8-E3, P4-E4, P5-D12, P3-F4, P6-H2, P1-E9, P8-D9, and P4-G11 (FIG. 49). In another aspect, said second iCID domain is an indinavir binding domain comprising a VH domain and VL domain selected from the group consisting of the VH and VL domains of P7-F7, P7-E7, P5-H5, P2-D8, P3-E12, P6-C8, P7-G8, P6-D7, P6-D5, P3-A11, P5-C3, P3-H5, P7-H10, P7-C6, P2-C2, P2-E8, P5-E9, P3-H7, P7-D6, P6-D11, P5-A9, P4-C5, P3-H2, P1-H3, P1-B12, P4-G12, P2-A10, P4-D11, P7-D12, P1-C11, P4-F9, P6-H5, P2-D7, P3-F5, P3-C5, P8-F4, P8-C2, P7-F12, P2-H7, P1-B7, P2-D9, P6-E8, P3-B9, P1-G1, P1-D11, P8-E3, P4-E4, P5-D12, P3-F4, P6-H2, P1-E9, P8-D9, and P4-G11 (FIG. 49). In another aspect, said second iCID is an indinavir-complex binding domain comprising: i) a variable heavy (VH) domain comprising a vhCDR1, vhCDR2, and vhCDR3 sequence; ii) a variable light (VL) domain comprising a vlCDR1, vlCDR2, and vlCDR3 sequence; wherein said vhCDR1, vhCDR2 and vhCDR3 sequences and said vlCDR1, vlCDR2, and vlCDR3 sequences are selected from the group consisting of the vhCDR1, vhCDR2 and vhCDR3 sequences and the vlCDR1, vlCDR2, and vlCDR3 sequences from Fab001, Fab002, Fab003, Fab004, Fab005, Fab006, Fab007, Fab008, Fab009, Fab0010, Fab0011, Fab0012, Fab0013, Fab0014, Fab0015, Fab0016, Fab0017, Fab0018, Fab0019, Fab0020, Fab0021, and Fab0022 (FIG. 50). In another aspect, said second iCID is an indinavir-complex binding domain comprising a VH domain and VL domain selected from the group consisting of the VH and VL domains of Fab001, Fab002, Fab003, Fab004, Fab005, Fab006, Fab007, Fab008, Fab009, Fab0010, Fab0011, Fab0012, Fab0013, Fab0014, Fab0015, Fab0016, Fab0017, Fab0018, Fab0019, Fab0020, Fab0021, and Fab0022 (FIG. 50).

### (iv) Useful CT Homodimeric Binding Proteins

[0312] In some embodiments, CT binding proteins are homodimeric proteins comprising two identical iCID domains, two identical αTTABDs, optional domain linker(s) and two homodimeric Fc domains.

[0313] The iCID domains and αTTABDs can take various formats including an Fab, an scFab, an scFv and a single domain antibody.

[0314] In some embodiments, the iCID domains take the format of an Fab comprising a VH-CH1 and VL-CL, and the αTTABDs take the format of an scFv. Accordingly, the CT binding protein comprises two heavy chains containing VH-CH1-hinge domain-Fc domain, and two light chain CT fusion proteins containing, from N to C terminus, VL-CL-domain linker-αTTABD or αTTABD-domain linker-VL-CL.

[0315] In some embodiments, the iCID domains take the format of an Fab comprising a VH-CH1 and VL-CL, and the αTTABDs take the format of an scFv. Accordingly, the CT binding protein comprises two heavy chains containing, from N to C terminus, αTTABD-domain linker-VH-CH1-hinge domain-Fc domain, and two light chains containing VL-CL. Alternatively, the CT binding protein comprises two heavy chains containing, from N to C terminus, VH-CH1-hinge domain-Fc domain-domain linker-αTTABD, and two light chains containing VL-CL.

[0316] In some embodiments, both the iCID domains and the αTTABDs take the format of an scFv. Accordingly, the CT binding protein comprises two identical fusion proteins of, from N to C terminal, αTTABD-domain linker-CID-optional domain linker-Fc domain, or iCID-domain linker-αTTABD-optional domain linker-Fc domain.

### 8. Exemplary Combinations for Format 1

[0317] As described herein, the T-LITE™ compositions are made up of two (or more) different binding proteins, at least one CC binding protein and at least one CT binding protein, which can be combined in various combinations. In the presence of indinavir, the iCID domains of the CC and CT binding proteins form a complex, such that the Format 1 compositions will bind to both CD3 and tumor, becoming active T cell engaging complexes. Any one of the CC binding proteins described herein can be combined with any one of the CT binding proteins described herein.

[0318] In one aspect, a T-cell ligand induced transient engager (T-LITE) composition comprises: a) a CC binding protein comprising a first iCID; and b) a CT binding protein comprising a second iCID; wherein one of said first iCID and said second iCID comprises the indinavir binding domain described herein and the other comprises the indinavir-complex binding domain described herein; and wherein in the presence of indinavir said first and second iCID domains form a complex of said first iCID domain-indinavir-said second iCID domain, such that said T-LITE composition will bind both CD3 and said tumor. In some embodiments, a T-cell ligand induced transient engager (T-LITE) composition comprises: a) a CC binding protein comprising two of first iCIDs; and b) two CT binding proteins, each comprising a second iCID; wherein one of said first iCID and said second iCID comprises the indinavir binding domain described herein and the other comprises the indinavir-complex binding domain described herein; and wherein in the presence of indinavir said first and second iCID domains form a complex of said first iCID domain-indinavir-said second iCID domain, such that said T-LITE composition will bind both CD3 and said tumor. In some embodiments, the first iCID comprises the indinavir binding domain described herein, and the second iCID comprises the indinavir-complex binding domain described herein. An exemplary configuration is disclosed as FIG. 1D. In some embodiments, the composition further comprises a second CT binding protein comprising the second iCID domain, wherein the CC binding protein further comprises a third iCID domain that is identical to the first iCID domain.

[0319] In one aspect, a T-cell ligand induced transient engager (T-LITE) composition comprises: a) a CC binding protein comprising two of a first iCID; and b) two of a CT binding protein comprising a second iCID; wherein one of said first iCID and said second iCID comprises the indinavir binding domain described herein and the other comprises the indinavir-complex binding domain described herein; and wherein in the presence of indinavir said first and second iCID domains form a complex of said first iCID domain-indinavir-said second iCID domain, such that said T-LITE composition will bind both CD3 and said tumor. In some embodiments, a T-cell ligand induced transient engager (T-LITE) composition comprises: a) a CC binding protein comprising two of first iCIDs; and b) two CT binding proteins, each comprising a second iCID; wherein one of said first iCID and said second iCID comprises the indinavir binding domain described herein and the other comprises the indinavir-complex binding domain described herein; and wherein in the presence of indinavir said first and second iCID domains form a complex of said first iCID domain-indinavir-said second iCID domain, such that said T-LITE composition will bind both CD3 and said tumor. In some embodiments, the first iCID comprises the indinavir binding domain described herein, and the second iCID comprises the indinavir-complex binding domain described herein. An exemplary configuration is disclosed as FIG. 1D.

### 9. Format 2 Complexes

[0320] As generally outlined herein, the invention provides pairs of binding proteins (e.g. a CC binding protein and a CTCoS binding protein) that together, in the presence of indinavir, to form a T cell engaging complex. Generally, each binding protein is in turn made up of either two fusion proteins (that together form either a CC binding protein or a CTCoS binding protein), or a monomeric fusion polypeptide as outlined below. An exemplary configuration for Format 2 is depicted in FIG. 2. As will be appreciated by those in the art, the CC binding proteins and the CTCoS binding proteins can each be independently selected from monomeric fusion polypeptides, homodimeric fusion proteins and heterodimeric fusion proteins. As described herein, the T-LITE™ compositions are made up of two (or more) different binding proteins, at least one CC binding protein and at least one CT binding protein, which can be combined in various combinations. In the presence of indinavir, the iCID domains of the CC and CT binding proteins form a complex, such that the Format 1 compositions will bind to both CD3 and tumor, becoming active T cell engaging complexes.

[0321] Any one of the CC binding proteins described herein can be combined with any one of the CTCoS binding proteins described herein.

[0322] In one aspect, a composition of the present disclosure comprises a CTCoS heterodimeric binding protein comprising: a) a first CTCoS fusion protein comprising: i) a first iCID domain; ii) optional domain linker(s); and iii) a first heterodimerization Fc domain; and b) a second CTCoS fusion protein comprising: i) the anti-tumor targeting antigen binding domain (αTTABD) described herein; ii) optional domain linker(s); and iii) a second heterodimerization Fc domain; wherein one of said first and second CTCoS fusion proteins further comprises a co-stimulatory domain.

[0323] In some embodiments, the anti-tumor targeting antigen may be EpCAM. In some embodiments, the αTTABD may comprise the composition comprising the EpCAM binding domain described herein.

[0324] In some embodiments, the first iCID domain may comprise a composition comprising an indinavir binding domain. In some embodiments, the first iCID domain may comprise a composition comprising an indinavir-complex binding domain.

[0325] In some embodiments, the composition further comprises a second CTCos binding protein comprising the second iCID domain, wherein the CC binding protein further comprises a third iCID domain that is identical to the first iCID domain.

[0326] In one aspect, a co-stimulatory T-cell ligand induced transient engager (BrighT-LITE) composition comprises: a) a CC binding protein and b) a CTCoS binding protein; wherein in the presence of indinavir said first and second iCID domains form a complex of said first iCID domain-said indinavir-said second iCID domain, such that said BrighT-LITE composition binds both CD3 and said tumor, wherein one of said first iCID and said second iCID comprises the indinavir binding domain described herein and the other comprises the indinavir-complex binding domain described herein, and wherein in the presence of indinavir said first and second iCID domains form a complex of said first iCID domain-indinavir-said second iCID domain, such that said T-LITE composition will bind both CD3 and said tumor. In some embodiments, the composition further comprises a second CTCoS binding protein comprising the second iCID domain, wherein the CC binding protein further comprises a third iCID domain that is identical to the first iCID domain.

a. CC Binding Proteins

[0327] The CC binding proteins of Format 2 may be the same as those for Format 1 (and Format 3). Thus, the invention provides CC fusion polypeptides that form the CC binding protein(s) of the invention. Each CC binding protein contains a first CID domain, and an anti-CD3 ABD. In some embodiments, the CC binding protein does not contain an Fc domain, such as direct fusion of a first iCID domain and an αCD3-ABD. Both the iCID domain and the αCD3-ABD can take the format of an scFv, a Fab, an scFab or a single domain antibody such as the VHH of camelid derived single domain antibody. In some embodiments, the CC binding protein contains an Fc domain. In some cases, the CC binding protein is monomeric. It can include an iCID domain directly fused to an αCD3-ABD, or it can also rely on the use of a monomeric Fc domain, as more fully outlined below. In some embodiments, the CC binding protein comprises a first and a second CC fusion polypeptide, that come together as dimers, either heterodimeric or homodimeric, to provide the αCD3-ABD functionally coupled to an iCID domain. In some embodiments, the iCID domain may be linked with another iCID domain via an optional domain linker as described above.

### (i) Monomeric CC Fusion Polypeptides

[0328] In some embodiments, the CC binding protein is monomeric and relies on the use of a monomeric IgG4 Fc domain. In some embodiments, the CC binding proteins are monomeric proteins comprising an iCID domain, an αCD3-ABD, optional domain linker(s) and an IgG4 monomeric Fc domain. The CC binding polypeptide can be a fusion polypeptide with a structure selected from the group, from N- to C-terminal: iCID domain-optional domain linker-αCD3-ABD-optional domain linker-Fc domain; αCD3-ABD-optional domain linker-iCID domain-optional domain linker-Fc domain; iCID domain-optional domain linker-Fc domain-optional domain linker-αCD3-ABD; αCD3-ABD-optional domain linker-Fc domain-optional domain linker-iCID domain; Fc domain-optional domain linker-αCD3-ABD-optional domain linker-iCID domain; Fc domain-optional domain linker-iCID domain-optional domain linker-αCD3-ABD; and iCID domain-optional domain linker-iCID domain-optional domain linker-αCD3 ABD-optional domain linker-Fc domain. Either or both of the CID and αCD3-ABD can take any one of the formats including Fab, scFv, scFab, a single domain antibody such as the VHH of camelid derived single domain antibody.

[0329] In some instances, the selected arrangements of domains of the monomeric CC binding protein employed in the BrighT-LITE compositions provide an improvement, e.g., in synthesis, stability, affinity or effector function, over other structures disclosed herein or known in the art. In some cases, a 2-fold, 3-fold, or 4-fold increase in, e.g. synthesis, stability, affinity, or effector activity is observed. In some cases, a 5-fold, 6-fold, 7-fold, 8-fold, 9-fold, 10-fold or higher increase in, e.g. stability, affinity, or effector activity, is observed.

### (ii) Dimeric CC Binding Proteins

[0330] In some embodiments, the CC binding protein comprises a first and a second CC fusion polypeptide, that come together as dimers, either heterodimeric or homodimeric, to provide the αCD3-ABD functionally coupled to an iCID domain. In these embodiments, the CC binding proteins rely on the use of Fc domains that are dimers, either heterodimeric Fc domains or homodimeric Fc domains. In some embodiments, the CC binding proteins are CC heterodimeric binding proteins that use heterodimerization variants in the Fc domains. Thus, in some embodiments, the CC binding protein comprises a first and a second CC fusion polypeptide, wherein one of the first and second CC fusion polypeptides contains the αCD3-ABD and the other the iCID domain. In some embodiments, the CC binding protein comprises a first CC fusion polypeptide which contains both the αCD3-ABD and the iCID domain, and a second CC fusion polypeptide comprising an empty Fc domain. In these embodiments, the first and second CC fusion polypeptides can have the structures (from N- to C-terminal, with “DL” standing for “domain linker”) shown in Table 4. In some embodiments, each of the CC fusion polypeptide having one iCIDs may further comprise another iCID linked to the iCID via an optional DL, for example, as shown in 37-40 in Table 4. The iCIDs in the same fusion polypeptide may be identical. In some embodiments, the iCIDs in the same fusion polypeptide may be different. The DLs in the same fusion polypeptide may be different. In some embodiments, the DLs in the same fusion polypeptide may be same.

[0331] As discussed herein, each of the iCID domains and αCD3-ABD domains of Table 4 can be selected from a Fab, an scFab, an scFvs or a single domain antibody such as the VHH of camelid derived single domain antibody. The Fc domains in the first CC fusion polypeptide and second CC fusion polypeptide heterodimerize with each other. The iCID domain(s) in the first CC fusion polypeptide and/or second CC fusion polypeptide can be selected from either half of the iCID domain pairs described herein.

[0332] In some embodiments, the CC binding proteins are CC homodimeric binding proteins that use standard Fc domains that self-assemble to form homodimers. In some embodiments, one of either of the iCID domain or the αCD3-ABD is formed using the VH and VL of a traditional, tetrameric antibody, and the other is attached to either the N- or C-terminus of the light chain or the N-terminus of the heavy chain. In some embodiments, one of either of the iCID domain or the αCD3-ABD is formed using the VH and VL of a traditional, tetrameric antibody, and the other is attached to C-terminus of Fc domain. For example, the iCID domain can take a Fab format, and the αCD3-ABD can take an scFv format attached to the C-terminus of the Fc domain. Alternatively, the αCD3-ABD can take a Fab format, and the iCID domain can take an scFv format attached to the C-terminus of the Fc domain. In some embodiments, both the iCID domain and the αCD3-ABD take the format of an scFv or scFab. From N- to C-terminal, the CC binding protein comprises iCID domain-optional domain linker-αCD3-ABD-optional domain linker-homodimeric Fc domain or αCD3-ABD-optional domain linker-iCID domain-optional domain linker-homodimeric Fc domain.

[0333] In some instances, the selected arrangements of domains of the dimeric CC binding protein employed in the BrighT-LITE composition provide for an improvement, e.g. in synthesis, stability, affinity or effector function, over other structures disclosed herein or known in the art. In some cases, a 2-fold, 3-fold, or 4-fold increase in, e.g. synthesis, stability, affinity, or effector activity is observed. In some cases, a 5-fold, 6-fold, 7-fold, 8-fold, 9-fold, 10-fold or higher increase in, e.g. stability, affinity, or effector activity, is observed.

(iii) Useful CC Heterodimeric Binding Proteins

[0334] As discussed herein, useful CC heterodimeric binding proteins are generally shown in FIGS. 2, 12A-12G and 13A-13C.

[0335] The iCID domain and αCD3-ABD can take various formats including an Fab, an scFv, an scFab, and a single domain antibody as described herein above. In some embodiments, both the iCID domain and αCD3 ABD take the format of an scFv. In some embodiments, the iCID domain takes the format of an Fab and the αCD3 ABD take the format of an scFv. In some embodiments, the iCID domain takes the format of an scFab and the αCD3 ABD take the format of an scFv. In some embodiments, the iCID domain takes the format of a single domain antibody and the αCD3-ABD take the format of an scFv.

[0336] In some embodiments, the iCID domain takes the format of a Fab and the αCD3 ABD take the format of an Fab. In some embodiments, the iCID domain takes the format of an scFab and the αCD3 ABD take the format of an Fab. In some embodiments, the iCID domain takes the format of an scFv and the αCD3 ABD take the format of an Fab. In some embodiments, the iCID domain takes the format of a single domain antibody and the αCD3-ABD take the format of a Fab.

[0337] In some embodiments, the iCID domain takes the format of an Fab and the αCD3 ABD take the format of an scFab. In some embodiments, the iCID domain takes the format of an scFab and the αCD3 ABD take the format of an scFab. In some embodiments, the iCID domain takes the format of an scFv and the αCD3 ABD take the format of an scFab. In some embodiments, the iCID domain takes the format of a single domain antibody and the αCD3 ABD take the format of an scFab.

[0338] In some embodiments, the iCID domain takes the format of an Fab and the αCD3-ABD take the format of a single domain antibody. In some embodiments, the iCID domain takes the format of an scFab and the αCD3 ABD take the format of a single domain antibody. In some embodiments, the iCID domain takes the format of an scFv and the αCD3 ABD take the format of a single domain antibody. In some embodiments, the iCID domain takes the format of a single domain antibody and the αCD3 ABD take the format of a single domain antibody.

[0339] In another aspect, the CC heterodimeric binding proteins comprises a Fc fusion protein and an empty Fc domain. The Fc fusion protein comprises a iCID domain, an αCD3 ABD, a first heterodimerization Fc domain and one or more optional linkers. The empty Fc domain contains a second heterodimerization Fc domain which heterodimerizes with the first heterodimerization Fc domain.

[0340] The iCID domain and αCD3 ABD can take various formats including an Fab, an scFv, an scFab, or a single domain antibody as described herein above. In some embodiments, the iCID takes the Fab format, and the αCD3 ABD takes the format of an Fab, an scFv, an scFab, or a single domain antibody. In some embodiments, the iCID takes the scFab format, and the αCD3 ABD takes the format of an Fab, an scFv, an scFab, or a single domain antibody. In some embodiments, the iCID takes the scFv format, and the αCD3 ABD takes the format of an Fab, an scFv, an scFab, or a single domain antibody. In some embodiments, the iCID takes the single domain antibody format, and the αCD3 ABD takes the format of an Fab, an scFv, an scFab, or a single domain antibody.

[0341] From N to C terminus, the Fc fusion protein can have configurations, such as iCID domain-optional domain linker-αCD3 ABD-optional domain linker-Fc, first iCID domain-optional domain linker-second iCID domain-optional domain linker-αCD3 ABD-optional domain linker-Fc, αCD3 ABD-optional domain linker-iCID domain-optional domain linker-Fc, αCD3 ABD-optional domain linker-first iCID domain-optional domain linker-second iCID domain-optional domain linker-Fc, αCD3 ABD-optional domain linker-Fc-optional domain linker-iCID domain, αCD3 ABD-optional domain linker-Fc-optional domain linker-first iCID domain-optional domain linker-second iCID domain, iCID domain-optional domain linker-Fc-optional domain linker-αCD3 ABD, and first iCID domain-optional domain linker-second iCID domain-optional domain linker-Fc-optional domain linker-αCD3 ABD. Further, from N to C terminus, the Fc fusion protein can have configurations, such as Fc-linker-iCID domain-optional domain linker-CD3 ABD, Fc-optional domain linker-CD3 ABD-optional domain linker-iCID domain, iCID domain-optional domain linker-Fc-liker-CD3 ABD, Fc-optional domain linker-first iCID domain-optional linker-second iCID domain-optional linker-CD3 ABD, Fc-Linker-CD3 ABD-optional domain linker-first iCID domain-optional domain linker-second iCID domain, and first iCID domain-optional domain linker-second iCID domain-optional domain linker-Fc-liker-CD3 ABD. Additionally, from N to C terminus, the Fc fusion protein can have configurations, such as iCID domain-optional domain linker-Fc, Fc-optional domain linker-iCID domain, CD3 ABD-optional domain linker-Fc, Fc-optional domain linker-CD3 ABD, first iCID domain-optional domain linker-Fc-optional domain linker-second iCID domain, first iCID domain-optional domain linker-second iCID domain-optional domain linker-Fc, Fc-optional domain linker-first iCID domain-optional domain linker-second iCID domain, CD3 ABD-optional domain linker-Fc, Fc-optional domain linker-CD3 ABD, first iCID domain-optional domain linker-second iCID domain-optional domain linker-Fc, and Fc-optional domain linker first iCID domain-optional domain linker-second iCID domain. The first and second iCID domains may be identical.

[0342] In one aspect, a composition described herein comprises a CC heterodimeric binding protein comprising; i) a first CC fusion protein comprising: 1) a first indinavir chemically induced dimerization (iCID) domain; 2) an optional linker; and 3) a first heterodimerization Fc domain; and ii) a second CC fusion protein comprising: 1) an anti-CD3 antigen binding domain (ABD; αCD3-ABD); 2) an optional domain linker, and 3) a second heterodimerization Fc domain. In some embodiments, the first CC fusion protein may further comprise a second iCID domain linked to the first iCID domain via an optional linker. The first and second iCID domains may be identical.

b. CTCoS Binding Proteins

[0343] Similar to CC binding proteins, the invention provides CTCoS binding proteins. Each CTCoS binding protein comprises an iCID domain, an anti-TTABD (αTTABD), and one or more co-stimulatory domains. In some embodiments, CTCoS binding proteins do not contain an Fc domain, such as direct fusion of an iCID domain, an αTTABD and one or more co-stimulatory domains. In some embodiments, CTCoS binding proteins contain an Fc domain. In some embodiments, CTCoS binding proteins comprise a first and a second CTCoS fusion polypeptide, that come together as dimers, either heterodimerically or homodimerically, to provide functional coupling of an αTTABD, one or more co-stimulatory domains and an iCID domain. Any of the iCID domain, the αTTABD and the co-stimulatory domain(s) can take the format of an scFv, a Fab, an scFab or a single domain antibody such as the VHH of camelid derived single domain antibody.

### (i) Dimeric CTCoS Binding Proteins

[0344] In some embodiments, the CTCoS binding protein comprises a first and a second CTCoS fusion polypeptide, that come together heterodimerically to provide the functional coupling of an αTTABD, one or more co-stimulatory domains and an iCID domain. In these embodiments, the CTCoS binding proteins rely on the use of heterodimerization variants in the Fc domains. Thus, in some embodiments, the CTCoS binding protein comprises a first and a second CTCoS fusion protein, wherein one of the first and second CTCoS fusion protein contains the αTTABD and the other the iCID domain, and wherein either or both the first and second CTCoS fusion proteins also contains one or more of the co-stimulatory domains.

[0345] Accordingly, in some embodiments, the first CTCoS fusion protein comprises an iCID domain, and the second CTCoS fusion protein comprises an αTTABD and a co-stimulatory domain. In some embodiments, the first CTCoS fusion protein comprises an iCID domain and a co-stimulatory domain, and the second CTCoS fusion protein comprises an αTTABD. In some embodiments, the first CTCoS fusion protein comprises an iCID domain and a first co-stimulatory domain, and the second CTCoS fusion protein comprises an αTTABD and a second co-stimulatory domain. In some embodiments, the first CTCoS fusion protein comprises an iCID domain, and the second CTCoS fusion protein comprises an αTTABD, a first co-stimulatory domain and a second co-stimulatory domain. In some embodiments, the first CTCoS fusion protein comprises an iCID domain, a first co-stimulatory domain and a second co-stimulatory domain; and the second CTCoS fusion protein comprises an (TABD. In some instances, the first and second co-stimulatory domains are identical. In some instances, the first and second co-stimulatory domains are different molecules.

[0346] Table 6 provides exemplary formats of the first and second CTCoS fusion protein that can be coupled to form a BrighT-LITE in the presence of an iCID small molecule (“DL” standing for “optional domain linker” and “CoS” standing for “co-stimulatory domain”). In some embodiments, the CTCoS fusion protein comprising an iCID domain may further comprise another iCID domain linked to the iCID domain via an optional domain linker as described above for Format 1 above. In some embodiments, the CTCoS fusion protein comprising a αTTABD may further comprise another αTTABD linked to the αTTABD via an optional domain linker as described above for Format 1 above.

TABLE 6

| | First CTCoS fusion protein | Second CTCoS fusion protein |
|---|---|---|
| | (N- to C- terminal) | (N- to C- terminal) |
| 1 | iCID-DL-Fc domain | Cos-DL-αTTABD-DL-Fc domain |
| 2 | iCID-DL-Fc domain | αTTABD-DL-CoS-DL-Fc domain |
| 3 | iCID-DL-Fc domain | Fc domain-DL-αTTABD-DL-CoS |
| 4 | iCID-DL-Fc domain | Fc domain-DL-CoS-DL-αTTABD-DL |
| 5 | αTTABD-DL-Fc domain | CoS-DL-iCID-DL-Fc domain |
| 6 | αTTABD-DL-Fc domain | iCID-DL-CoS-DL-Fc domain |
| 7 | αTTABD-DL-Fc domain | Fc domain-DL-CoS-DL-iCID |
| 8 | αTTABD-DL-Fc domain | Fc domain-DL-iCID-DL-CoS-DL |
| 9 | αTTABD-DL-iCID-DL-Fc domain | CoS-DL-Fc domain |
| 10 | αTTABD-DL-iCID-DL-Fc domain | Fc domain-DL-CoS |
| 11 | αTTABD-DL-iCID-DL-Fc domain | CoS-DL-CID-DL-Fc domain |
| 12 | αTTABD-DL-iCID-DL-Fc domain | iCID-DL-CoS-DL-Fc domain |
| 13 | αTTABD-DL-iCID-DL-Fc domain | Fc domain-DL-CoS-DL-iCID |
| 14 | αTTABD-DL-iCID-DL-Fc domain | Fc domain-DL-iCID-DL-CoS-DL |
| 15 | iCID-DL-αTTABD-DL-Fc domain | CoS-DL-Fc domain |
| 16 | iCID-DL-αTTABD-DL-Fc domain | Fc domain-DL-CoS |
| 17 | iCID-DL-αTTABD-DL-Fc domain | CoS-DL-iCID-DL-Fc domain |
| 18 | iCID-DL-αTTABD-DL-Fc domain | iCID-DL-CoS-DL-Fc domain |
| 19 | iCID-DL-αTTABD-DL-Fc domain | Fc domain-DL-CoS-DL-iCID |
| 20 | iCID-DL-αTTABD-DL-Fc domain | Fc domain-DL-iCID-DL-CoS-DL |
| 21 | Fc domain-DL-iCID | Cos-DL-αTTABD-DL-Fc domain |
| 22 | Fc domain-DL-iCID | αTTABD-DL-CoS-DL-Fc domain |
| 23 | Fc domain-DL-iCID | Fc domain-DL-αTTABD-DL-CoS |
| 24 | Fc domain-DL-iCID | Fc domain-DL-CoS-DL-αTTABD-DL |
| 25 | Fc domain-DL-αTTABD | CoS-DL-Fc domain |
| 26 | Fc domain-DL-αTTABD | Fc domain-DL-CoS |
| 27 | Fc domain-DL-αTTABD | CoS-DL-iCID-DL-Fc domain |
| 28 | Fc domain-DL-αTTABD | iCID-DL-CoS-DL-Fc domain |
| 29 | Fc domain-DL-αTTABD | Fc domain-DL-CoS-DL-iCID |
| 30 | Fc domain-DL-αTTABD | Fc domain-DL-iCID-DL-CoS-DL |
| 31 | Fc domain-DL-αTTABD-DL-iCID | CoS-DL-Fc domain |
| 32 | Fc domain-DL-αTTABD-DL-iCID | Fc domain-DL-CoS |
| 33 | Fc domain-DL-αTTABD-DL-iCID | CoS-DL-iCID-DL-Fc domain |
| 34 | Fc domain-DL-αTTABD-DL-iCID | iCID-DL-CoS-DL-Fc domain |
| 35 | Fc domain-DL-αTTABD-DL-iCID | Fc domain-DL-CoS-DL-iCID |
| 36 | Fc domain-DL-αTTABD-DL-iCID | Fc domain-DL-iCID-DL-CoS-DL |
| 37 | Fc domain-DL-iCID-DL-αTTABD-DL | CoS-DL-Fc domain |
| 38 | Fc domain-DL-iCID-DL-αTTABD-DL | Fc domain-DL-CoS |
| 39 | Fc domain-DL-iCID-DL-αTTABD-DL | CoS-DL-CID-DL-Fc domain |
| 40 | Fc domain-DL-iCID-DL-αTTABD-DL | iCID-DL-CoS-DL-Fc domain |
| 41 | Fc domain-DL-iCID-DL-αTTABD-DL | Fc domain-DL-CoS-DL-iCID |
| 42 | Fc domain-DL-iCID-DL-αTTABD-DL | Fc domain-DL-iCID-DL-CoS-DL |

[0347] As discussed herein, each of the iCID domains, αTTABD, and co-stimulatory domains of Table 6 can be selected from a Fab, an scFab, an scFvs or a single domain antibody such as the VHH of camelid derived single domain antibody. The Fc domains in the first CTCoS fusion protein and second CTCoS fusion protein heterodimerize with each other. The iCID domain in the first CTCoS fusion protein can be selected from one half of the iCID domain pairs described herein. The iCID domain in the second CTCoS fusion protein can be selected from the other half of the iCID domain pairs.

[0348] In some instances, the selected arrangements of domains of the dimeric CTCoS binding proteins employed in the BrighT-LITE compositions provide an improvement, e.g. in synthesis, stability, affinity or effector function, over other structures disclosed herein or known in the art. In some cases, a 2-fold, 3-fold, or 4-fold increase in, e.g. synthesis, stability, affinity, or effector activity is observed. In some cases, a 5-fold, 6-fold, 7-old, 8-fold, 9-fold, 10-fold or higher increase in, e.g. stability, affinity, or effector activity, is observed.

### (ii) Useful CTCoS Heterodimeric Binding Proteins

[0349] In one aspect, the CTCoS heterodimeric binding proteins comprising an iCID domain, an αTTABD, and a co-stimulatory domain comprise a first CTCoS fusion protein and a second CTCoS fusion protein. The first CTCoS fusion protein comprises an iCID domain linked to a first heterodimerization Fc domain via an optional domain linker. The second CTCoS fusion protein comprises an αTTABD linked to a second heterodimerization Fc domain via an optional domain linker. The co-stimulatory domain is either included in the first CTCoS fusion protein or the second CTCoS fusion protein. The first and the second heterodimerization Fc domains heterodimerize to form the CTCoS heterodimeric binding protein.

[0350] In some embodiments, the first CTCoS fusion protein comprises an iCID domain and a first heterodimerization Fc domain, and the second CTCoS fusion protein comprises an αTTABD, a co-stimulatory domain and a second heterodimerization Fc domain. The iCID domain can be linked to the N terminus or the C terminus of the first heterodimerization Fc domain in the first CTCoS fusion protein. In the second CTCoS fusion protein, the αTTABD or the co-stimulatory domain can be linked to the N terminus or the C terminus of the second heterodimerization Fc domain. In some embodiments, both the αTTABD and the co-stimulatory domain are linked to the N terminus of the second heterodimerization Fc domain, e.g., from the N to the C terminal, in the format of αTTABD-CoS-Fc domain or CoS-αTTABD-Fc domain. In some embodiments, the αTTABD is linked to the N terminus of the second heterodimerization Fc domain, and the co-stimulatory domain is linked to the C terminus of the second heterodimerization Fc domain. In some embodiments, the co-stimulatory domain is linked to the N terminus of the second heterodimerization Fc domain, and the αTTABD is linked to the C terminus of the second heterodimerization Fc domain. In some embodiments, the composition further comprises a second CTCos binding protein comprising the second iCID domain, wherein the CC binding protein further comprises a third iCID domain that is identical to the first iCID domain.

[0351] The iCID domain and the αTTABD can take various formats including a Fab, an scFv, an scFab, and a single domain antibody as described herein. The co-stimulatory domain can be antibody fragment or a ligand as described herein. When the co-stimulatory domain is an antibody fragment, it can take various formats including a Fab, an scFv, an scFab, and a single domain antibody as described herein. For example, in some embodiments, the iCID domain, αTTABD, and co-stimulatory domain take the format of an scFv. In some embodiments, the iCID domain takes the format of a Fab and the αTTABD and co-stimulatory domain take the format of an scFv. In some embodiments, the iCID domain takes the format of an scFab and the αTTABD and co-stimulatory domain take the format of an scFv. In some embodiments, the iCID domain takes the format of a Fab, an scFv, an scFab, or a single domain antibody; the αTTABD takes the format of a Fab composed of VH-CH1 and VL-CL; and the co-stimulatory domain take the format of an scFv. The αTTABD is linked to the second heterodimerization Fc domain via an optional domain linker, and the co-stimulatory domain is linked to the N terminus of VH-CH1, the N or C terminus of VL-CL, or the C terminus of the second heterodimerization Fc domain. In some embodiments, the iCID domain takes the format of a Fab, an scFv, an scFab, or a single domain antibody; the co-stimulatory domain takes the format of a Fab composed of VH-CH1 and VL-CL; and the αTTABD take the format of an scFv. The co-stimulatory domain is linked to the second heterodimerization Fc domain via an optional domain linker, and the αTTABD is linked to the N terminus of VH-CH1, the N or C terminus of VL-CL, or the C terminus of the second heterodimerization Fc domain. In some embodiments, the iCID domain takes the format of a Fab, an scFv, an scFab, or a single domain antibody linked to the first heterodimerization Fc domain. The αTTABD takes the format of a Fab, an scFv, an scFab, or a single domain antibody and is linked to the second heterodimerization Fc domain. The co-stimulatory domain is a ligand, and is linked to either the N terminus of the αTTABD or the C terminus of the second heterodimerization Fc domain.

[0352] In some embodiments, the first CTCoS fusion protein comprises an iCID domain, a co-stimulatory domain and a first heterodimerization Fc domain; and the second CTCoS fusion protein comprises an αTTABD and a second heterodimerization Fc domain. The αTTABD can be linked to the N terminus or the C terminus of the second heterodimerization Fc domain in the second CTCoS fusion protein. In the first CTCoS fusion protein, the iCID domain or the co-stimulatory domain can be linked to the N terminus or the C terminus of the first heterodimerization Fc domain. In some embodiments, both the iCID domain and the co-stimulatory domain are linked to the N terminus of the first heterodimerization Fc domain, e.g., from the N to the C terminal, in the format of iCID-CoS-Fc domain or CoS-iCID-Fc domain. In some embodiments, the iCID domain is linked to the N terminus of the first heterodimerization Fc domain, and the co-stimulatory domain is linked to the C terminus of the first heterodimerization Fc domain. In some embodiments, the co-stimulatory domain is linked to the N terminus of the first heterodimerization Fc domain, and the iCID domain is linked to the C terminus of the first heterodimerization Fc domain.

[0353] The iCID domain, and αTTABD can take various formats including a Fab, an scFv, an scFab, and a single domain antibody as described herein. The co-stimulatory domain can be antibody fragment or a ligand as described herein. When the co-stimulatory domain is an antibody fragment, it can take various formats including a Fab, an scFv, an scFab, and a single domain antibody as described herein. For example, in some embodiments, both the iCID domain, αTTABD, and co-stimulatory domain take the format of an scFv. In some embodiments, the αTTABD takes the format of a Fab and the iCID domain and co-stimulatory domain take the format of an scFv. In some embodiments, the αTTABD takes the format of an scFab, and the iCID domain and co-stimulatory domain take the format of an scFv. In some embodiments, the αTTABD takes the format of a Fab, an scFv, an scFab, or a single domain antibody; the iCID domain takes the format of a Fab composed of VH-CH1 and VL-CL; and the co-stimulatory domain take the format of an scFv. The αTTABD is linked to the first heterodimerization Fc domain via an optional domain linker, and the co-stimulatory domain is linked to the N terminus of VH-CH1 of the iCID domain, the N or C terminus of VL-CL of the iCID domain, or the C terminus of the first heterodimerization Fc domain. In some embodiments, the αTTABD takes the format of a Fab, an scFv, an scFab, or a single domain antibody; the co-stimulatory domain takes the format of a Fab composed of VH-CH1 and VL-CL; and the iCID domain take the format of an scFv. The co-stimulatory domain is linked to the first heterodimerization Fc domain via an optional domain linker, and the iCID domain is linked to the N terminus of VH-CH1 of the αTTABD, the N or C terminus of VL-CL of the αTTABD, or the C terminus of the first heterodimerization Fc domain. In some embodiments, the αTTABD takes the format of a Fab, an scFv, an scFab, or a single domain antibody linked to the second heterodimerization Fc domain. The iCID takes the format of a Fab, an scFv, an scFab, or a single domain antibody and is linked to the first heterodimerization Fc domain. The co-stimulatory domain is a ligand, and is linked to either the N terminus of the iCID domain or the C terminus of the first heterodimerization Fc domain.

[0354] In another aspect, the CTCoS heterodimeric binding proteins comprising an iCID domain, an αTTABD, and two co-stimulatory domain comprise a first CTCoS fusion protein and a second CTCoS fusion protein. In some embodiments, the first CTCoS fusion protein comprises an iCID domain, a first co-stimulatory domain, and a first heterodimerization Fc domain. The second CTCoS fusion protein comprises an αTTABD, a second co-stimulatory domain, and a second heterodimerization Fc domain. In some embodiments, the first CTCoS fusion protein comprises an iCID domain, and a first heterodimerization Fc domain. The second CTCoS fusion protein comprises an αTTABD, a first and a second co-stimulatory domains, and a second heterodimerization Fc domain. In some embodiments, the first CTCoS fusion protein comprises an iCID domain, a first and a second co-stimulatory domains, and a first heterodimerization Fc domain. The second CTCoS fusion protein comprises an αTTABD and a second heterodimerization Fc domain. In some instances, the first and second co-stimulatory domains are identical. In some instances, the first and second co-stimulatory domains are different molecules.

[0355] In some embodiments, the first CTCoS fusion protein comprises an iCID domain, a first co-stimulatory domain (referred to as “CoS1”), and a first heterodimerization Fc domain. Exemplary formats include, from the N terminal to C terminal, iCID-DL-CoS1-DL-Fc domain, CoS1-DL-iCID-DL-domain, CoS1-DL-Fc domain-DL-iCID, iCID-DL-Fc domain-DL-CoS1, Fc domain-DL-CoS1-DL-iCID, or Fc domain-DL-iCID-DL-CoS1. The second CTCoS fusion protein comprises an αTTABD, a second co-stimulatory domain (referred to as “CoS2”), and a second heterodimerization Fc domain. Optional domain linkers (referred to as “DL”) are used to link the various domains. Exemplary formats include, from the N terminal to C terminal, αTTABD-DL-CoS2-DL-Fc domain, CoS2-DL-αTTABD-DL-Fc domain, CoS2-DL-Fc domain-DL-αTTABD, αTTABD-DL-Fc domain-DL-CoS2, Fc domain-DL-CoS2-DL-αTTABD, or Fc domain-DL-αTTABD-DL-CoS2.

[0356] In some embodiments, the first CTCoS fusion protein comprises an iCID domain and a first heterodimerization Fc domain. The second CTCoS fusion protein comprises an αTTABD, a first co-stimulatory domain (referred to as CoS1), a second co-stimulatory domain (referred to as CoS2), and a second heterodimerization Fc domain. Exemplary formats include, from the N terminal to C terminal, αTTABD-DL-CoS1-DL-CoS2-DL-Fc domain, CoS1-DL-CoS2-DL-αTTABD-DL-Fc domain, CoS1-DL-αTTABD-DL-CoS2-DL-Fc domain, CoS1-DL-Fc domain-DL-αTTABD-DL-CoS2, CoS1-DL-Fc domain-DL-CoS2-DL-αTTABD, CoS1-DL-αTTABD-DL-Fc domain-DL-CoS2, αTTABD-DL-CoS1-DL-Fc domain-DL-CoS2, αTTABD-DL-Fc domain-DL-CoS1-DL-CoS2, Fc domain-DL-CoS1-DL-αTTABD-DL-CoS2, Fc domain-DL-αTTABD-DL-CoS1-DL-CoS2, and Fc domain-DL-CoS1-DL-CoS2-DL-αTTABD. In these embodiments, CoS1 and CoS2 can exchange positions in the second CTCoS fusion proteins.

[0357] In some embodiments, the first CTCoS fusion protein comprises an iCID domain, a first co-stimulatory domain (referred to as CoS1), a second co-stimulatory domain (referred to as CoS2), and a first heterodimerization Fc domain. The second CTCoS fusion protein comprises an αTTABD and a second heterodimerization Fc domain. Exemplary formats include, from the N terminal to C terminal, iCID-DL-CoS1-DL-CoS2-DL-Fc domain, CoS1-DL-CoS2-DL-iCID-DL-Fc domain, CoS1-DL-iCID-DL-CoS2-DL-Fc domain, CoS1-DL-Fc domain-DL-iCID-DL-CoS2, CoS1-DL-Fc domain-DL-CoS2-DL-iCID, CoS1-DL-iCID-DL-Fc domain-DL-CoS2, iCID-DL-CoS1-DL-Fc domain-DL-CoS2, iCID-DL-Fc domain-DL-CoS1-DL-CoS2, Fc domain-DL-CoS1-DL-iCID-DL-CoS2, Fc domain-DL-iCID-DL-CoS1-DL-CoS2, and Fc domain-DL-CoS1-DL-CoS2-DL-iCID. In these embodiments, CoS1 and CoS2 can exchange positions in the first CTCoS fusion proteins.

[0358] The iCID domain, and αTTABD can take various formats including a Fab, an scFv, an scFab, and a single domain antibody as described herein. Either the first or the second co-stimulatory domains can be an antibody fragment or a ligand as described herein. In some embodiments, the first co-stimulatory domains is an antibody fragment, and the second co-stimulatory domain is a ligand. In some embodiments, the first co-stimulatory domains is a ligand, and the second co-stimulatory domain is an antibody fragment. In some embodiments, the first and second co-stimulatory domains are ligands. In some embodiments, the first and second co-stimulatory domains are antibody fragments. When the co-stimulatory domains are antibody fragments, they can take various formats including a Fab, an scFv, an scFab, and a single domain antibody as described herein.

[0359] For example, in some embodiments, the first CTCoS fusion protein comprises an iCID domain linked to a first heterodimerization Fc domain, wherein the iCID domain is in the format of an Fab comprising VH-CH1 and VL-CL. The second CTCoS fusion protein comprises, from the N terminal to the C terminal, the αTTABD-DL-CoS1-DL-Fc-DL-CoS2, wherein the αTTABD and the first co-stimulatory domains take the format of an scFv. The second co-stimulatory domain is a ligand linked to the C terminus of the second heterodimerization Fc domain.

[0360] In some embodiments, the first CTCoS fusion protein comprises, from the N terminal to the C terminal, CoS1-DL-iCID-Fc domain, wherein the iCID domain is in the format of an Fab comprising VH-CH1 and VL-CL, and the first co-stimulatory domain is a ligand (such as 41BBL trimer) linked to the N terminus of VH-CH1 and VL-CL. The second CTCoS fusion protein comprises, from the N terminal to the C terminal, the αTTABD-DL-CoS2-DL-Fc or CoS-DL-αTTABD-DL-Fc, wherein the αTTABD and the second co-stimulatory domains take the format of an scFv.

### 10. Formats of CC and CTTCoS Components of the BrighT-LITE Complexes

[0361] As generally outlined herein, the invention provides pairs of binding proteins (e.g. a CC binding protein and a CTTCoS binding protein) that together, in the presence of a CID-SM, form a T cell engaging complex. An exemplary configuration for Format 3 is depicted in FIG. 3. Generally, each binding protein is in turn made up of either two fusion proteins (that together form either a CC binding protein or a CTTCoS binding protein), or a monomeric fusion polypeptide as outlined below. As will be appreciated by those in the art, the CC binding proteins and the CTTCoS binding proteins can each be independently selected from monomeric fusion polypeptides, homodimeric fusion proteins and heterodimeric fusion proteins.

[0362] In one aspect, a composition comprises a CTTCoS heterodimeric binding protein comprising: a) a first CTCoS fusion protein comprising: i) a first iCID domain; ii) optional domain linker(s); iii) a first anti-tumor targeting antigen binding domain (αTTABD); iv) a first heterodimerization Fc domain; and b) a second CTCoS fusion protein comprising: i) a T-cell co-stimulatory receptor binding domain (CoS); ii) optional domain linker(s); iii) a second αTTABD; and iv) a second heterodimerization Fc domain.

[0363] In some embodiments, the first and/or antigen tumor targeting agent may be EpCAM. In some embodiments, the αTTABD may comprise the composition comprising the EpCAM binding domain described herein.

[0364] In some embodiments, the first iCID domain may comprise a composition comprising an indinavir binding domain. In some embodiments, the first iCID domain may comprise a composition comprising an indinavir-complex binding domain.

[0365] In some embodiments, the composition further comprises a second CT binding protein comprising the second iCID domain, wherein the CC binding protein further comprises a third iCID domain that is identical to the first iCID domain.

[0366] In one aspect, a co-stimulatory dual targeting T-cell ligand induced transient engager (dual BrighT-LITE) composition comprises: a) a CC binding protein; and b) a CTTCoS binding protein; wherein in the presence of indinavir said first and second iCID domains form a complex of said first iCID domain-said indinavir-said second iCID domain, such that said BrighT-LITE composition binds both CD3 and said tumor, wherein one of said first iCID and said second iCID is the indinavir binding domain described herein and the other is the indinavir-complex binding domain described herein, and wherein in the presence of indinavir said first and second iCID domains form a complex of said first iCID domain-indinavir-said second iCID domain, such that said T-LITE composition will bind both CD3 and said tumor. In some embodiments, the composition further comprises a second CT binding protein comprising the second iCID domain, wherein the CC binding protein further comprises a third iCID domain that is identical to the first iCID domain.

a. CC Binding Proteins

[0367] Accordingly, the present invention provides CC fusion polypeptides that form the CC binding protein(s) of the invention. The CC binding proteins of this format are the same as those for Format 1 or 2. Each CC binding protein contains a first CID domain, and an anti-CD3 ABD. In some embodiments, the CC binding protein does not contain an Fc domain, such as direct fusion of a first iCID domain and an αCD3-ABD. Both the iCID domain and the αCD3-ABD can take the format of an scFv, a Fab, an scFab or a single domain antibody such as the VHH of a camelid derived single domain antibody. In some embodiments, the CC binding protein contains an Fc domain. In some cases, the CC binding protein is monomeric. It can include an iCID domain directly fused to an αCD3-ABD, or it can also rely on the use of a monomeric Fc domain, as more fully outlined below. In some embodiments, the CC binding protein comprises a first and a second CC fusion polypeptide, that come together as dimers, either heterodimeric or homodimeric, to provide the αCD3-ABD functionally coupled to an iCID domain. In some embodiments, the iCID domain may be linked with another iCID domain via an optional domain linker as described above.

### (i) Monomeric CC Fusion Polypeptides

[0368] In some embodiments, the CC binding protein is monomeric and relies on the use of a monomeric IgG4 Fc domain. In some embodiments, the CC binding proteins are monomeric proteins comprising an iCID domain, an αCD3-ABD, optional domain linker(s) and an IgG4 monomeric Fc domain. The CC binding polypeptide can be a fusion polypeptide with a structure selected from the group, from N- to C-terminal: iCID domain-optional domain linker-αCD3-ABD-optional domain linker-Fc domain; αCD3-ABD-optional domain linker-iCID domain-optional domain linker-Fc domain; iCID domain-optional domain linker-Fc domain-optional domain linker-αCD3-ABD; αCD3-ABD-optional domain linker-Fc domain-optional domain linker-iCID domain; Fc domain-optional domain linker-αCD3-ABD-optional domain linker-iCID domain; Fc domain-optional domain linker-iCID domain-optional domain linker-αCD3-ABD; and iCID domain-optional domain linker-iCID domain-optional domain linker-αCD3 ABD-optional domain linker-Fc domain. Either or both of the iCID and αCD3-ABD can take any one of the formats including Fab, scFv, scFab, a single domain antibody such as the VHH of camelid derived single domain antibody.

[0369] In some instances, the selected arrangements of domains of the monomeric CC binding protein employed in the T-LITE composition provide an improvement, e.g., in synthesis, stability, affinity or effector function, over other structures disclosed herein or known in the art. In some cases, a 2-fold, 3-fold, or 4-fold increase in, e.g. synthesis, stability, affinity, or effector activity is observed. In some cases, a 5-fold, 6-fold, 7-fold, 8-fold, 9-fold, 10-fold or higher increase in, e.g. stability, affinity, or effector activity, is observed.

### (ii) Dimeric CC Binding Proteins

[0370] In some embodiments, the CC binding protein comprises a first and a second CC fusion polypeptide, that come together as dimers, either heterodimeric or homodimeric, to provide the αCD3-ABD functionally coupled to an iCID domain. In these embodiments, the CC binding proteins rely on the use of Fc domains that are dimers, either heterodimeric Fc domains or homodimeric Fc domains.

[0371] In some embodiments, the CC binding proteins are CC heterodimeric binding proteins that use heterodimerization variants in the Fc domains. Thus, in some embodiments, the CC binding protein comprises a first and a second CC fusion polypeptide, wherein one of the first and second CC fusion polypeptides contains the αCD3-ABD and the other the iCID domain. In some embodiments, the CC binding protein comprises a first CC fusion polypeptide which contains both the αCD3-ABD and the iCID domain, and a second CC fusion polypeptide comprising an empty Fc domain. In these embodiments, the first and second CC fusion polypeptides can have the structures (from N- to C-terminal, with “DL” standing for “domain linker”) shown in Table 4. In some embodiments, each of the CC fusion polypeptide having one iCIDs may further comprise another iCID linked to the iCID via an optional DL, for example, as shown in 37-40 in Table 4. The iCIDs in the same fusion polypeptide may be identical. In some embodiments, the iCIDs in the same fusion polypeptide may be different. The DLs in the same fusion polypeptide may be different. In some embodiments, the DLs in the same fusion polypeptide may be same.

[0372] As discussed herein, each of the iCID domains and αCD3-ABD domains of Table 4 can be selected from a Fab, an scFab, an scFvs or a single domain antibody such as the VHH of camelid derived single domain antibody. The Fc domains in the first CC fusion polypeptide and second CC fusion polypeptide heterodimerize with each other. The iCID domain(s) in the first CC fusion polypeptide and/or second CC fusion polypeptide can be selected from either half of the iCID domain pairs described herein. Exemplary formats are illustrated in FIGS. 12 and 13A-13B.

[0373] In some embodiments, the CC binding proteins are CC homodimeric binding proteins that use standard Fc domains that self-assemble to form homodimers. In some embodiments, one of either of the iCID domain or the αCD3-ABD is formed using the VH and VL of a traditional, tetrameric antibody, and the other is attached to either the N- or C-terminus of the light chain or the N-terminus of the heavy chain.

[0374] In some embodiments, one of either of the iCID domain or the αCD3-ABD is formed using the VH and VL of a traditional, tetrameric antibody, and the other is attached to C-terminus of Fc domain. For example, the iCID domain can take a Fab format, and the αCD3-ABD can take an scFv format attached to the C-terminus of the Fc domain. Alternatively, the αCD3-ABD can take a Fab format, and the iCID domain can take an scFv format attached to the C-terminus of the Fc domain. In some embodiments, both the iCID domain and the αCD3-ABD take the format of an scFv or scFab. From N- to C-terminal, the CC binding protein comprises iCID domain-optional domain linker-αCD3-ABD-optional domain linker-homodimeric Fc domain or αCD3-ABD-optional domain linker-iCID domain-optional domain linker-homodimeric Fc domain.

[0375] In some instances, the selected arrangements of domains of the dimeric CC binding protein employed in the BrighT-LITE composition provide for an improvement, e.g. in synthesis, stability, affinity or effector function, over other structures disclosed herein or known in the art. In some cases, a 2-fold, 3-fold, or 4-fold increase in, e.g. synthesis, stability, affinity, or effector activity is observed. In some cases, a 5-fold, 6-fold, 7-fold, 8-fold, 9-fold, 10-fold or higher increase in, e.g. stability, affinity, or effector activity, is observed.

(iii) Useful CC Heterodimeric Binding Proteins

[0376] As discussed herein, useful CC heterodimeric binding proteins are generally shown in FIGS. 3, 12A-12G and 13A-13C as discussed below.

[0377] The CID domain and αCD3 ABD can take various formats including an Fab, an scFv, an scFab, and a single domain antibody as described herein above. In some embodiments, both the iCID domain and αCD3 ABD take the format of an scFv. In some embodiments, the iCID domain takes the format of an Fab and the αCD3 ABD take the format of an scFv as shown in FIGS. 12 and 13A-13B. In some embodiments, the iCID domain takes the format of an scFab and the αCD3 ABD take the format of an scFv as shown in FIGS. 12 and 13A-13B. In some embodiments, the iCID domain takes the format of a single domain antibody and the αCD3 ABD take the format of an scFv.

[0378] In some embodiments, the iCID domain takes the format of a Fab and the αCD3 ABD take the format of an Fab. In some embodiments, the iCID domain takes the format of an scFab and the αCD3 ABD take the format of an Fab. In some embodiments, the iCID domain takes the format of an scFv and the αCD3 ABD take the format of an Fab. In some embodiments, the iCID domain takes the format of a single domain antibody and the αCD3 ABD take the format of a Fab.

[0379] In some embodiments, the iCID domain takes the format of an Fab and the αCD3 ABD take the format of an scFab. In some embodiments, the iCID domain takes the format of an scFab and the αCD3 ABD take the format of an scFab. In some embodiments, the iCID domain takes the format of an scFv and the αCD3 ABD take the format of an scFab. In some embodiments, the iCID domain takes the format of a single domain antibody and the αCD3 ABD take the format of an scFab.

[0380] In some embodiments, the iCID domain takes the format of an Fab and the αCD3 ABD take the format of a single domain antibody. In some embodiments, the iCID domain takes the format of an scFab and the αCD3 ABD take the format of a single domain antibody. In some embodiments, the iCID domain takes the format of an scFv and the αCD3 ABD take the format of a single domain antibody. In some embodiments, the iCID domain takes the format of a single domain antibody and the αCD3 ABD take the format of a single domain antibody.

[0381] In another aspect, the CC heterodimeric binding proteins comprises a Fc fusion protein and an empty Fc domain. The Fc fusion protein comprises an iCID domain, an αCD3 ABD, a first heterodimerization Fc domain and one or more optional linkers. The empty Fc domain contains a second heterodimerization Fc domain which heterodimerizes with the first heterodimerization Fc domain.

[0382] The iCID domain and αCD3 ABD can take various formats including an Fab, an scFv, an scFab, or a single domain antibody as described herein above. In some embodiments, the iCID takes the Fab format, and the αCD3 ABD takes the format of an Fab, an scFv, an scFab, or a single domain antibody. In some embodiments, the iCID takes the scFab format, and the αCD3 ABD takes the format of an Fab, an scFv, an scFab, or a single domain antibody. In some embodiments, the iCID takes the scFv format, and the αCD3 ABD takes the format of an Fab, an scFv, an scFab, or a single domain antibody. In some embodiments, the iCID takes the single domain antibody format, and the αCD3 ABD takes the format of an Fab, an scFv, an scFab, or a single domain antibody.

[0383] From N to C terminus, the Fc fusion protein can have configurations, such as iCID domain-optional domain linker-αCD3 ABD-optional domain linker-Fc, first iCID domain-optional domain linker-second iCID domain-optional domain linker-αCD3 ABD-optional domain linker-Fc, αCD3 ABD-optional domain linker-iCID domain-optional domain linker-Fc, αCD3 ABD-optional domain linker-first iCID domain-optional domain linker-second iCID domain-optional domain linker-Fc, αCD3 ABD-optional domain linker-Fc-optional domain linker-iCID domain, αCD3 ABD-optional domain linker-Fc-optional domain linker-first iCID domain-optional domain linker-second iCID domain, iCID domain-optional domain linker-Fc-optional domain linker-αCD3 ABD, and first iCID domain-optional domain linker-second iCID domain-optional domain linker-Fc-optional domain linker-αCD3 ABD. Further, from N to C terminus, the Fc fusion protein can have configurations, such as Fc-linker-iCID domain-optional domain linker-CD3 ABD, Fc-optional domain linker-CD3 ABD-optional domain linker-iCID domain, iCID domain-optional domain linker-Fc-liker-CD3 ABD, Fc-optional domain linker-first iCID domain-optional linker-second iCID domain-optional linker-CD3 ABD, Fc-Linker-CD3 ABD-optional domain linker-first iCID domain-optional domain linker-second iCID domain, and first iCID domain-optional domain linker-second iCID domain-optional domain linker-Fc-liker-CD3 ABD. Additionally, from N to C terminus, the Fc fusion protein can have configurations, such as iCID domain-optional domain linker-Fc, Fc-optional domain linker-iCID domain, CD3 ABD-optional domain linker-Fc, Fc-optional domain linker-CD3 ABD, first iCID domain-optional domain linker-Fc-optional domain linker-second iCID domain, first iCID domain-optional domain linker-second iCID domain-optional domain linker-Fc, Fc-optional domain linker-first iCID domain-optional domain linker-second iCID domain, CD3 ABD-optional domain linker-Fc, Fc-optional domain linker-CD3 ABD, first iCID domain-optional domain linker-second iCID domain-optional domain linker-Fc, and Fc-optional domain linker first iCID domain-optional domain linker-second iCID domain. The first and second iCID domains may be identical.

[0384] In one aspect, a composition described herein comprises a CC heterodimeric binding protein comprising; i) a first CC fusion protein comprising: 1) a first indinavir chemically induced dimerization (iCID) domain; 2) an optional linker; and 3) a first heterodimerization Fc domain; and ii) a second CC fusion protein comprising: 1) an anti-CD3 antigen binding domain (ABD; αCD3-ABD); 2) an optional domain linker, and 3) a second heterodimerization Fc domain. In some embodiments, the first CC fusion protein may further comprise a second iCID domain linked to the first iCID domain via an optional linker. The first and second iCID domains may be identical.

b. CTTCoS Binding Proteins

[0385] The invention provides CTTCoS binding proteins. Each CTCoS binding protein comprises an iCID domain, two or more anti-TTABD (αTTABD), and a T cell co-stimulatory domain. In some embodiments, the CTTCoS binding proteins comprises an Fc domain. In some embodiments, CTCoS binding proteins comprise a first and a second Fc fusion proteins, that come together as dimers, for example, heterodimerically to provide functional coupling of the two or more αTTABD, co-stimulatory domain and iCID domain. Any of the iCID domain, the αTTABDs and the co-stimulatory domain can take the format of an scFv, a Fab, an scFab or a single domain antibody such as the VHH of camelid derived single domain antibody.

### (i) Dimeric CTCoS Binding Proteins

[0386] In some embodiments, the CTCoS binding protein comprises a first and a second CTCoS fusion proteins, that come together heterodimerically to provide the functional coupling of the two or more αTTABDs, co-stimulatory domain and CID domain. In these embodiments, the CTCoS binding proteins rely on the use of heterodimerization variants in the Fc domains. Thus, in some embodiments, the CTCoS binding protein comprises a first and a second CTCoS fusion protein, wherein one of the first and second CTTCoS fusion protein contains the CID domain and at least one of the two or more αTTABDs, and the other CTCoS fusion protein contains the co-stimulatory domain and at least one of the two or more αTTABDs. In some instances, the first and second co-stimulatory domains are identical. In some instances, the two or more αTTABDs bind to the same tumor targeting antigen. In some instances, each of the two or more αTTABDs binds to different tumor targeting antigens.

[0387] Table 7 provides exemplary formats of the first and second CTTCoS fusion protein that can be coupled to form a BrighT-LITE in the presence of an iCID small molecule (“DL” standing for “optional domain linker” and “CoS” standing for “co-stimulatory domain”). In some embodiments, the CTCoS fusion protein comprising an iCID domain may further comprise another iCID domain linked to the iCID domain via an optional domain linker as described above for Format 1 above. In some embodiments, the CTCoS fusion protein comprising a αTTABD may further comprise another αTTABD linked to the αTTABD via an optional domain linker as described above for Format 1 or 2 above.

TABLE 7

| | First CTTCoS fusion protein | Second CTTCoS fusion protein |
|---|---|---|
| | (N- to C- terminal) | (N- to C- terminal) |
| 1 | αTTABD-DL-iCID-DL-Fc domain | αTTABD-DL-COS-DL-Fc domain |
| 2 | αTTABD-DL-iCID-DL-Fc domain | CoS-DL- αTTABD-DL-Fc domain |
| 3 | iCID-DL-αTTABD-DL-Fc domain | αTTABD-DL-CoS-DL-Fc domain |
| 4 | iCID-DL-αTTABD-DL-Fc domain | CoS-DL- αTTABD-DL-Fc domain |
| 5 | αTTABD-DL-iCID-DL-Fc domain | Fc domain-DL-αTTABD-DL-CoS |
| 6 | αTTABD-DL-iCID-DL-Fc domain | Fc domain-DL-CoS-DL-αTTABD-DL |
| 7 | iCID-DL-αTTABD-DL-Fc domain | Fc domain-DL-αTTABD-DL-CoS |
| 8 | iCID-DL-αTTABD-DL-Fc domain | Fc domain-DL-CoS-DL-αTTABD-DL |
| 9 | Fc domain-DL-αTTABD-DL-iCID | αTTABD-DL-CoS-DL-Fc domain |
| 10 | Fc domain-DL-αTTABD-DL-iCID | CoS-DL- αTTABD-DL-Fc domain |
| 11 | Fc domain-DL-iCID-DL-αTTABD-DL | αTTABD-DL-CoS-DL-Fc domain |
| 12 | Fc domain-DL-iCID-DL-αTTABD-DL | CoS-DL- αTTABD-DL-Fc domain |
| 13 | Fc domain-DL-αTTABD-DL-iCID | Fc domain-DL-αTTABD-DL-CoS |
| 14 | Fc domain-DL-αTTABD-DL-iCID | Fc domain-DL-CoS-DL-αTTABD-DL |
| 15 | Fc domain-DL-iCID-DL-αTTABD-DL | Fc domain-DL-αTTABD-DL-CoS |
| 16 | Fc domain-DL-iCID-DL-αTTABD-DL | Fc domain-DL-CoS-DL-αTTABD-DL |

[0388] As discussed herein, each of the iCID domains, αTTABDs, and co-stimulatory domain of Table 7 can be selected from a Fab, an scFab, an scFvs or a single domain antibody such as the VHH of camelid derived single domain antibody. The Fc domains in the first CTTCoS fusion protein and second CTTCoS fusion protein heterodimerize with each other. The iCID domain in the first CTTCoS fusion protein can be selected from one half of the iCID domain pairs described herein. The iCID domain in the second CTTCoS fusion protein can be selected from the other half of the CID domain pairs.

[0389] In some instances, the selected arrangements of domains of the dimeric CTTCoS binding proteins employed in the BrighT-LITE composition provide an improvement, e.g. in synthesis, stability, affinity or effector function, over other structures disclosed herein or known in the art. In some cases, a 2-fold, 3-fold, or 4-fold increase in, e.g. synthesis, stability, affinity, or effector activity is observed. In some cases, a 5-fold, 6-fold, 7-fold, 8-fold, 9-fold, 10-fold or higher increase in, e.g. stability, affinity, or effector activity, is observed.

### (ii) Useful CTTCoS Heterodimeric Binding Proteins

[0390] In some embodiments, the CTTCoS heterodimeric binding proteins comprising a first CTTCoS fusion protein and a second CTTCoS fusion protein. The first CTTCoS fusion protein comprises, an iCID domain, a first αTTABD, and a first heterodimerization Fc domain. The second CTTCoS fusion protein comprises, a CoS, a second αTTABD, and a second heterodimerization Fc domain. In some embodiments, the first CTTCoS fusion protein comprises, from the N terminal to C terminal, αTTABD-optional domain linker-iCID-optional domain linker-Fc domain. The second CTTCoS fusion protein comprises, from the N terminal to C terminal, αTTABD-optional domain linker-CoS-optional domain linker-Fc domain. The iCID domain and the αTTABD in these embodiments can take various formats including a Fab, an scFv, an scFab, and a single domain antibody as described herein. The CoS in these embodiments can be antibody fragment or a ligand as described herein. When the CoS is an antibody fragment, it can take various formats including a Fab, an scFv, an scFab, and a single domain antibody as described herein. For example, in some embodiments, the iCID domain, αTTABDs, and CoS take the format of an scFv. In some embodiments, the iCID domain takes the format of a Fab, and the αTTABDs and CoS take the format of an scFv as shown in FIG. 14. In some embodiments, the iCID domain takes the format of an scFab and the αTTABDs and CoS take the format of an scFv. In some embodiments, the iCID domain and CoS take the format of a Fab, and the αTTABDs take the format of an scFv. In some embodiments, the iCID domain and CoS take the format of an scFab, and the αTTABDs take the format of an scFv. In some embodiments, the iCID is a single domain molecule (e.g., an antibody domain that binds to indinavir or recognizes the complex of indinavir or the variants thereof), and the αTTABDs and CoS take the format of an scFv. In some embodiments, the iCID is a single domain molecule (e.g., BCl-2 or the variants thereof), and the αTTABDs and CoS take the format of an scFab. In some embodiments, the iCID is a single domain molecule, the CoS take the format of a Fab, and the αTTABDs take the format of an scFv. In some embodiments, the iCID is a single domain molecule, the CoS taked the format of an scFab, and the αTTABDs take the format of an scFv.

[0391] In some embodiments, the CTTCoS heterodimeric binding proteins comprising a first CTTCoS fusion protein and a second CTTCoS fusion protein. The first CTTCoS fusion protein comprises, an iCID domain, a first αTTABD, and a first heterodimerization Fc domain. The second CTTCoS fusion protein comprises, a CoS, a second αTTABD, and a second heterodimerization Fc domain. In some embodiments, the first CTTCoS fusion protein comprises, from the N terminal to C terminal, iCID-optional domain linker-αTTABD-optional domain linker-Fc domain. The second CTTCoS fusion protein comprises, from the N terminal to C terminal, CoS-optional domain linker-αTTABD-optional domain linker-Fc domain. The iCID domain and the αTTABD in these embodiments can take various formats including a Fab, an scFv, an scFab, and a single domain antibody as described herein. The CoS in these embodiments can be an antibody fragment or a ligand as described herein. When the CoS is an antibody fragment, it can take various formats including a Fab, an scFv, an scFab, and a single domain antibody as described herein. For example, in some embodiments, the iCID domain, αTTABDs, and CoS take the format of an scFv. In some embodiments, the αTTABDs take the format of a Fab, and the iCID and CoS take the format of an scFv. In some embodiments, the αTTABDs takes the format of an scFab, and the iCID and CoS take the format of an scFv. In some embodiments, the αTTABDs takes the format of an scFab, and the iCID and CoS take the format of an scFab. In some embodiments, the αTTABDs takes the format of an scFv, and the iCID and CoS take the format of an scFab. In some embodiments, the iCID is a single domain molecule, and the αTTABDs and CoS take the format of an scFv. In some embodiments, the iCID is a single domain molecule, the αTTABDs take the format of a Fab, and the CoS takes the format of an scFv as shown in FIG. 14. In some embodiments, the iCID is a single domain molecule, the αTTABDs take the format of an scFab, and the CoS takes the format of an scFv. In some embodiments, the iCID is a single domain molecule, the αTTABDs take the format of an scFab, and the CoS takes the format of an scFab. In some embodiments, the iCID is a single domain molecule, the αTTABDs take the format of an scFv, and the CoS take the format of an scFab.

### 11. Other Formats of the BrighT-LITEs of the Invention

[0392] As outlined herein, the BrighT-LITEs of the invention are made up of two (or more) different binding proteins, at least one CTTCoS binding protein and at least one CC binding protein, which can be combined in various combinations. In the presence of an iCID small molecule, the iCID domains of the CC and CTCoS binding proteins form a complex, such that the BrighT-LITE™ compositions will bind to both CD3 and tumor targeting antigen(s), becoming active T cell engaging complexes.

[0393] Any one of the CC binding proteins described herein can be combined with any one of the CTCoS binding proteins described herein.

### 12. Improving Switchable Activation of the T-LITEs and BrighT-LITEs of the Invention

[0394] In another aspect, each of the CC and CT heterodimeric binding proteins having the iCID domain(s) as described herein comprises a first heterodimerization variant, and each of the CC and CT heterodimeric binding proteins having αCD3-ABD and αTTABD, respectively, as described herein comprises a second heterodimerization variant that corresponds to the first heterodimerization variant. In another aspect, each of the CC and CT heterodimeric binding proteins having the iCID domain(s) as described herein comprises a first Fc chain comprising a first heterodimerization variant, and each of the CC and CT heterodimeric binding proteins having αCD3-ABD and αTTABD, respectively, as described herein comprises an second Fc chain comprising a second heterodimerization variant that corresponds to the first heterodimerization variant. As shown in FIGS. 38 and 39, having Fc chains containing the same or similar heterodimerization variants in the CC and CT heterodimeric binding proteins comprising the iCID domain(s) may improve the switchable activation of the T-LITE, BrighT-LITE, dual targeting BrightT-LITES, or variants thereof as described herein. In some embodiments, the first heterodimerization variant is a hole variant, and the second heterodimerization variant is a knob variant.

[0395] In some embodiments, the first heterodimerization variant is a knob variant, and the second heterodimerization variant is a hole variant. In some embodiments, both CC and CT heterodimeric binding proteins having the iCID domain(s) have the same first heterodimerization variant. In some embodiments, both CC and CT heterodimeric binding proteins having αCD3-ABD and αTTABD, respectively, have the same second heterodimerization variant. The CT heterodimeric binding protein may be the CT Cos or CTTCos heterodimeric binding protein described herein.

[0396] In some embodiments, each of the CC and CT heterodimeric binding proteins having the iCID domain(s) as described herein comprises an Fc chain comprising a knob variant, and each of the corresponding CC and CT heterodimeric binding proteins having αCD3-ABD and αTTABD, respectively, comprises an Fc chain comprising a hole variant corresponding to the knob variant. In some embodiments, each of the CC and CT heterodimeric binding proteins having the iCID domain(s) as described herein comprises an Fc chain comprising a hole variant, and each of the corresponding CC and CT heterodimeric binding proteins having αCD3-ABD and αTTABD, respectively, comprises an Fc chain comprising a knob variant corresponding to the hole variant. Some examples of the knob and hole Fc sequences are disclosed in FIG. 10.

[0397] In some embodiments, the Fc domain described herein having a knob variant comprises a sequence having at least 85, 86, 87, 88, 89, 90, 91, 92, 93, 94, 95, 96, 97, 98, 99 and 100% identity to any one of SEQ ID NO: 3235, 3237, 3239, 3241, and 3243. In some embodiments, the Fc domain described herein having a hole variant comprises a sequence having at least 85, 86, 87, 88, 89, 90, 91, 92, 93, 94, 95, 96, 97, 98, 99 and 100% identity to any one of SEQ ID NO: 3236, 3238, 3240, 3242, and 3244. In some embodiments, the Fc domain described herein having a knob variant comprises the sequence of 3235. In some embodiments, the Fc domain described herein having a knob variant comprises the sequence of 3237. In some embodiments, the Fc domain described herein having a knob variant comprises the sequence of 3239. In some embodiments, the Fc domain described herein having a knob variant comprises the sequence of 3241. In some embodiments, the Fc domain described herein having a knob variant comprises the sequence of 3243. In some embodiments, the Fc domain described herein having a hole variant comprises the sequence of SEQ ID NO: 3236. In some embodiments, the Fc domain described herein having a hole variant comprises the sequence of SEQ ID NO: 3238. In some embodiments, the Fc domain described herein having a hole variant comprises the sequence of SEQ ID NO: 3240. In some embodiments, the Fc domain described herein having a hole variant comprises the sequence of SEQ ID NO: 3242. In some embodiments, the Fc domain described herein having a hole variant comprises the sequence of SEQ ID NO: 3244.

### C. Nucleic Acids, Expression Vectors, Host Cells

[0398] Nucleic acid compositions encoding the T-LITE™ and BrighT-LITE™ compositions described herein are provided, including polynucleotide molecules encoding each component of the CC and CTTCoS binding proteins described herein.

[0399] Expression vectors containing the nucleic acids, and host cells transformed with the nucleic acids and/or expression vectors are also provided. As will be appreciated by those in the art, the protein sequences depicted herein can be encoded by any number of possible nucleic acid sequences, due to the degeneracy of the genetic code.

[0400] In some embodiments, the polynucleotide molecules are provided as DNA constructs.

[0401] In some embodiments, the polynucleotide molecules encoding each monomeric fusion protein of the CC and CT binding protein are placed into different expression vectors. In some embodiments, the polynucleotide molecules encoding each monomeric fusion protein of the CC and CT binding protein are placed into a single expression vector.

[0402] In some embodiments, the polynucleotide molecules encoding each monomeric fusion protein of the CC binding protein are placed into a first single expression vector, and the polynucleotide molecules encoding each monomeric fusion protein of the CT binding protein are placed into a second single expression vector.

[0403] In some embodiments, the polynucleotide molecules encoding each fusion protein of the CC and CTCoS binding protein are placed into different expression vectors. In some embodiments, the polynucleotide molecules encoding each fusion protein of the CC and CTCoS binding protein are placed into a single expression vector.

[0404] In some embodiments, the polynucleotide molecules encoding each fusion protein of the CC binding protein are placed into a first single expression vector, and the polynucleotide molecules encoding each fusion protein of the CTCoS binding protein are placed into a second single expression vector.

[0405] In some embodiments, the polynucleotide molecules encoding each fusion protein of the CC and CTTCoS binding protein are placed into different expression vectors. In some embodiments, the polynucleotide molecules encoding each fusion protein of the CC and CTTCoS binding protein are placed into a single expression vector.

[0406] In some embodiments, the polynucleotide molecules encoding each fusion protein of the CC binding protein are placed into a first single expression vector, and the polynucleotide molecules encoding each fusion protein of the CTTCoS binding protein are placed into a second single expression vector.

[0407] Expression vectors, as is known in the art, can contain the appropriate transcriptional and translational control sequences, including, but not limited to, signal and secretion sequences, regulatory sequences, promoters, origins of replication, selection genes, etc.

[0408] Expression vectors can be transformed into host cells, where they are expressed to form the composition described herein. An appropriate host cell expression system includes but is not limited to bacteria, an insect cell, and a mammalian cell. Preferred mammalian host cells for expressing the recombinant antibodies according to at least some embodiments of the invention include Chinese Hamster Ovary (CHO cells), PER.C6, HEK293 and others as is known in the art.

[0409] In some embodiments, the CC and CT binding proteins are produced and isolated separately. The expression vector(s) comprising polynucleotide molecules encoding each monomeric fusion protein of the CC binding protein can be transformed into one host cell. Components of the CC binding proteins are expressed by the host cell, isolated and, optionally, further purified. The expression vector(s) comprising polynucleotide molecules encoding each monomeric fusion protein of the CT binding protein can be transformed into another host cell. Components of the CT binding proteins are expressed by the host cell, isolated and, optionally, further purified. In some embodiments, the CC and CT binding proteins are produced and isolated together. Accordingly, the expression vector(s) comprising polynucleotide molecules encoding each monomeric fusion protein of the CC binding protein and CT binding proteins can be transformed into a single host cell for protein expression and further isolation.

[0410] In some embodiments, the CC and CTCoS binding proteins are produced and isolated separately. The expression vector(s) comprising polynucleotide molecules encoding each fusion protein of the CC binding protein can be transformed into one host cell. Components of the CC binding proteins are expressed by the host cell, isolated and, optionally, further purified. The expression vector(s) comprising polynucleotide molecules encoding each fusion protein of the CTCoS binding protein can be transformed into another host cell. Components of the CTCoS binding proteins are expressed by the host cell, isolated and, optionally, further purified.

[0411] In some embodiments, the CC and CTCoS binding proteins are produced and isolated together. Accordingly, the expression vector(s) comprising polynucleotide molecules encoding each fusion protein of the CC binding protein and CTCoS binding protein can be transformed into a single host cell for protein expression and further isolation.

[0412] In some embodiments, the CC and CTTCoS binding proteins are produced and isolated separately. The expression vector(s) comprising polynucleotide molecules encoding each fusion protein of the CC binding protein can be transformed into one host cell. Components of the CC binding proteins are expressed by the host cell, isolated and, optionally, further purified. The expression vector(s) comprising polynucleotide molecules encoding each fusion protein of the CTTCoS binding protein can be transformed into another host cell. Components of the CTTCoS binding proteins are expressed by the host cell, isolated and, optionally, further purified.

[0413] In some embodiments, the CC and CTTCoS binding proteins are produced and isolated together. Accordingly, the expression vector(s) comprising polynucleotide molecules encoding each fusion protein of the CC binding protein and CTTCoS binding protein can be transformed into a single host cell for protein expression and further isolation.

[0414] In another aspect, the present disclosure relates to a T-cell ligand induced transient engager (T-LITE) composition comprising: a) a CC binding protein according to any of claims D1 to D7; and b) a CT binding protein according to any of claims E1 to E6; wherein one of said first iCID and said second iCID is an indinavir binding domain and the other is an indinavir-complex binding domain, wherein said indinavir binding domain comprises: i) a variable heavy (VH) domain comprising a vhCDR1, vhCDR2, and vhCDR3 sequence; ii) a variable light (VL) domain comprising a vlCDR1, vlCDR2, and vlCDR3 sequence; wherein said vhCDR1, vhCDR2 and vhCDR3 sequences and said vlCDR1, vlCDR2, and vlCDR3 sequences are selected from the group consisting of the vhCDR1, vhCDR2 and vhCDR3 sequences and the vlCDR1, vlCDR2, and vlCDR3 sequences from P7-F7, P7-E7, PS-HS, P2-D8, P3-E12, P6-C8, P7-G8, P6-D7, P6-DS, P3-A11, PS-C3, P3-HS, P7-H10, P7-C6, P2-C2, P2-E8, PS-E9, P3-H7, P7-D6, P6-D11, PS-A9, P4-C5, P3-H2, P1-H3, P1-B12, P4-G12, P2-A10, P4-D11, P7-D12, P1-C11, P4-F9, P6-HS, P2-D7, P3-FS, P3-C5, P8-F4, P8-C2, P7-F12, P2-H7, P1-B7, P2-D9, P6-E8, P3-B9, P1-G1, P1-D11, P8-E3, P4-E4, PS-D12, P3-F4, P6-H2, P1-E9, P8-D9, and P4-G11 (FIG. 49) and said indinavir-complex binding domain comprises: i) a variable heavy (VH) domain comprising a vhCDR1, vhCDR2, and vhCDR3 sequence; ii) a variable light (VL) domain comprising a vlCDR1, vlCDR2, and vlCDR3 sequence; wherein said vhCDR1, vhCDR2 and vhCDR3 sequences and said vlCDR1, vlCDR2, and vlCDR3 sequences are selected from the group consisting of the vhCDR1, vhCDR2 and vhCDR3 sequences and the vlCDR1, vlCDR2, and vlCDR3 sequences from Fab001, Fab002, Fab003, Fab004, Fab005, Fab006, Fab007, Fab008, Fab009, Fab0010, Fab0011, Fab0012, Fab0013, Fab0014, Fab0015, Fab0016, Fab0017, Fab0018, Fab0019, Fab0020, Fab0021, and Fab0022 (FIG. 50); and wherein in the presence of indinavir said first and second iCID domains form a complex of said first iCID domain-indinavir-said second iCID domain, such that said T-LITE composition will bind both CD3 and said tumor. In another aspect, the present disclosure relates to a composition comprising a CTCoS heterodimeric binding protein comprising: a) a first CTCoS fusion protein comprising: i) a first iCID domain; ii) optional domain linker(s); and iii) a first heterodimerization Fc domain; and b) a second CTCoS fusion protein comprising: i) an anti-tumor target antigen binding domain (αTTABD); ii) optional domain linker(s); and iii) a second heterodimerization Fc domain; wherein one of said first and second CTCoS fusion proteins further comprises a co-stimulatory domain. In some embodiments, said first iCID domain is an indinavir binding domain comprising: i) a variable heavy (VH) domain comprising a vhCDR1, vhCDR2, and vhCDR3 sequence; ii) a variable light (VL) domain comprising a vlCDR1, vlCDR2, and vlCDR3 sequence; wherein said vhCDR1, vhCDR2 and vhCDR3 sequences and said vlCDR1, vlCDR2, and vlCDR3 sequences are selected from the group consisting of the vhCDR1, vhCDR2 and vhCDR3 sequences and the vlCDR1, vlCDR2, and vlCDR3 sequences from P7-F7, P7-E7, PS-HS, P2-D8, P3-E12, P6-C8, P7-G8, P6-D7, P6-DS, P3-A11, PS-C3, P3-HS, P7-H10, P7-C6, P2-C2, P2-E8, PS-E9, P3-H7, P7-D6, P6-D11, PS-A9, P4-C5, P3-H2, P1-H3, P1-B12, P4-G12, P2-A10, P4- D11, P7-D12, P1-C11, P4-F9, P6-HS, P2-D7, P3-FS, P3-C5, P8-F4, P8-C2, P7-F12, P2-H7, P1-B7, P2- D9, P6-E8, P3-B9, P1-G1, P1-D11, P8-E3, P4-E4, PS-D12, P3-F4, P6-H2, P1-E9, P8-D9, and P4-G11 (FIG. 49). In some embodiments, said first iCID domain is an indinavir binding domain comprising a VH domain and VL domain selected from the group consisting of the VH and VL domains of P7-F7, P7-E7, PS-HS, P2-D8, P3-E12, P6-C8, P7-G8, P6-D7, P6-DS, P3-A11, PS-C3, P3-HS, P7-H10, P7-C6, P2-C2, P2-E8, PS-E9, P3-H7, P7-D6, P6-D11, PS-A9, P4-C5, P3-H2, P1-H3, P1-B12, P4-G12, P2-A10, P4- D11, P7-D12, P1-C11, P4-F9, P6-HS, P2-D7, P3-FS, P3-C5, P8-F4, P8-C2, P7-F12, P2-H7, P1-B7, P2- D9, P6-E8, P3-B9, P1-G1, P1-D11, P8-E3, P4-E4, PS-D12, P3-F4, P6-H2, P1-E9, P8-D9, and P4-G11 (FIG. 49). In some embodiments, the first iCID is an indinavir-complex binding domain comprising: i) a variable heavy (VH) domain comprising a vhCDR1, vhCDR2, and vhCDR3 sequence; ii) a variable light (VL) domain comprising a vlCDR1, vlCDR2, and vlCDR3 sequence; wherein said vhCDR1, vhCDR2 and vhCDR3 sequences and said vlCDR1, vlCDR2, and vlCDR3 sequences are selected from the group consisting of the vhCDR1, vhCDR2 and vhCDR3 sequences and the vlCDR1, vlCDR2, and vlCDR3 sequences from Fab001, Fab002, Fab003, Fab004, Fab005, Fab006, Fab007, Fab008, Fab009, Fab0010, Fab0011, Fab0012, Fab0013, Fab0014, Fab0015, Fab0016, Fab0017, Fab0018, Fab0019, Fab0020, Fab0021, and Fab0022 (FIG. 50). In some embodiments, second iCID is an indinavir-complex binding domain comprising a VH domain and VL domain selected from the group consisting of the VH and VL domains of Fab001, Fab002, Fab003, Fab004, Fab005, Fab006, Fab007, Fab008, Fab009, Fab0010, Fab0011, Fab0012, Fab0013, Fab0014, Fab0015, Fab0016, Fab0017, Fab0018, Fab0019, Fab0020, Fab0021, and Fab0022 (FIG. 50). The present disclosure relates to a co-stimulatory T-cell ligand induced transient engager (BrighT-LITE) composition comprising: a) a CC binding protein according to any of claims D1 to D7; and the CTCoS binding protein; wherein in the presence of indinavir said first and second iCID domains form a complex of said first iCID domain-said indinavir-said second iCID domain, such that said BrighT-LITE composition binds both CD3 and said tumor, wherein one of said first iCID and said second iCID is an indinavir binding domain and the other is an indinavir-complex binding domain, wherein said indinavir binding domain comprises: i) a variable heavy (VH) domain comprising a vhCDR1, vhCDR2, and vhCDR3 sequence; ii) a variable light (VL) domain comprising a vlCDR1, vlCDR2, and vlCDR3 sequence; wherein said vhCDR1, vhCDR2 and vhCDR3 sequences and said vlCDR1, vlCDR2, and vlCDR3 sequences are selected from the group consisting of the vhCDR1, vhCDR2 and vhCDR3 sequences and the vlCDR1, vlCDR2, and vlCDR3 sequences from P7-F7, P7-E7, PS-HS, P2-D8, P3-E12, P6-C8, P7-G8, P6-D7, P6-DS, P3-A11, PS-C3, P3-HS, P7-H10, P7-C6, P2-C2, P2-E8, PS-E9, P3-H7, P7-D6, P6-D11, PS-A9, P4-C5, P3-H2, P1-H3, P1-B12, P4-G12, P2-A10, P4- D11, P7-D12, P1-C11, P4-F9, P6-HS, P2-D7, P3-FS, P3-C5, P8-F4, P8-C2, P7-F12, P2-H7, P1-B7, P2- D9, P6-E8, P3-B9, P1-G1, P1-D11, P8-E3, P4-E4, PS-D12, P3-F4, P6-H2, P1-E9, P8-D9, and P4-G11 (FIG. 49) and said indinavir-complex binding domain comprises: i) a variable heavy (VH) domain comprising a vhCDR1, vhCDR2, and vhCDR3 sequence; ii) a variable light (VL) domain comprising a vlCDR1, vlCDR2, and vlCDR3 sequence; wherein said vhCDR1, vhCDR2 and vhCDR3 sequences and said vlCDR1, vlCDR2, and vlCDR3 sequences are selected from the group consisting of the vhCDR1, vhCDR2 and vhCDR3 sequences and the vlCDR1, vlCDR2, and vlCDR3 sequences from Fab001, Fab002, Fab003, Fab004, Fab005, Fab006, Fab007, Fab008, Fab009, Fab0010, Fab0011, Fab0012, Fab0013, Fab0014, Fab0015, Fab0016, Fab0017, Fab0018, Fab0019, Fab0020, Fab0021, and Fab0022 (FIG. 50); and wherein in the presence of indinavir said first and second iCID domains form a complex of said first iCID domain-indinavir-said second iCID domain, such that said T-LITE composition will bind both CD3 and said tumor. The present disclosure relates to a composition comprising a CTTCoS heterodimeric binding protein comprising: a) a first CTTCoS fusion protein comprising: i) a first iCID domain; ii) optional domain linker(s); iii) a first anti-tumor targeting antigen binding domain (αTTABD); iv) a first heterodimerization Fc domain; and b) a second CTTCoS fusion protein comprising: i) a T-cell co-stimulatory receptor binding domain (CoS); ii) optional domain linker(s); iii) a second αTTABD; and iv) a second heterodimerization Fc domain; wherein one of said first iCID and said second iCID is an indinavir binding domain and the other is an indinavir-complex binding domain, wherein said indinavir binding domain comprises: i) a variable heavy (VH) domain comprising a vhCDR1, vhCDR2, and vhCDR3 sequence; ii) a variable light (VL) domain comprising a vlCDR1, vlCDR2, and vlCDR3 sequence; wherein said vhCDR1, vhCDR2 and vhCDR3 sequences and said vlCDR1, vlCDR2, and vlCDR3 sequences are selected from the group consisting of the vhCDR1, vhCDR2 and vhCDR3 sequences and the vlCDR1, vlCDR2, and vlCDR3 sequences from P7-F7, P7-E7, PS-HS, P2-D8, P3-E12, P6-C8, P7-G8, P6-D7, P6-DS, P3-A11, PS-C3, P3-HS, P7-H10, P7-C6, P2-C2, P2-E8, PS-E9, P3-H7, P7-D6, P6-D11, PS-A9, P4-C5, P3-H2, P1-H3, P1-B12, P4-G12, P2-A10, P4-D11, P7-D12, P1-C11, P4-F9, P6-HS, P2-D7, P3-FS, P3-C5, P8-F4, P8-C2, P7-F12, P2-H7, P1-B7, P2-D9, P6-E8, P3-B9, P1-G1, P1-D11, P8-E3, P4-E4, PS-D12, P3-F4, P6-H2, P1-E9, P8-D9, and P4-G11 (FIG. 49) and said indinavir-complex binding domain comprises: i) a variable heavy (VH) domain comprising a vhCDR1, vhCDR2, and vhCDR3 sequence; ii) a variable light (VL) domain comprising a vlCDR1, vlCDR2, and vlCDR3 sequence; wherein said vhCDR1, vhCDR2 and vhCDR3 sequences and said vlCDR1, vlCDR2, and vlCDR3 sequences are selected from the group consisting of the vhCDR1, vhCDR2 and vhCDR3 sequences and the vlCDR1, vlCDR2, and vlCDR3 sequences from Fab001, Fab002, Fab003, Fab004, Fab005, Fab006, Fab007, Fab008, Fab009, Fab0010, Fab0011, Fab0012, Fab0013, Fab0014, Fab0015, Fab0016, Fab0017, Fab0018, Fab0019, Fab0020, Fab0021, and Fab0022 (FIG. 50); and wherein in the presence of indinavir said first and second iCID domains form a complex of said first iCID domain-indinavir-said second iCID domain, such that said T-LITE composition will bind both CD3 and said tumor. The present disclosure relates to a co-stimulatory dual targeting T-cell ligand induced transient engager (dual BrighT-LITE) composition comprising: a) the CC binding protein; and the CTCoS binding protein; wherein in the presence of indinavir said first and second iCID domains form a complex of said first iCID domain-said indinavir-said second iCID domain, such that said BrighT-LITE composition binds both CD3 and said tumor, wherein one of said first iCID and said second iCID is an indinavir binding domain and the other is an indinavir-complex binding domain, wherein said indinavir binding domain comprises: i) a variable heavy (VH) domain comprising a vhCDR1, vhCDR2, and vhCDR3 sequence; ii) a variable light (VL) domain comprising a vlCDR1, vlCDR2, and vlCDR3 sequence; wherein said vhCDR1, vhCDR2 and vhCDR3 sequences and said vlCDR1, vlCDR2, and vlCDR3 sequences are selected from the group consisting of the vhCDR1, vhCDR2 and vhCDR3 sequences and the vlCDR1, vlCDR2, and vlCDR3 sequences from P7-F7, P7-E7, PS-HS, P2-D8, P3-E12, P6-C8, P7-G8, P6-D7, P6-DS, P3-A11, PS-C3, P3-HS, P7-H10, P7-C6, P2-C2, P2-E8, PS-E9, P3-H7, P7-D6, P6-D11, PS-A9, P4-C5, P3-H2, P1-H3, P1-B12, P4-G12, P2-A10, P4-D11, P7-D12, P1-C11, P4-F9, P6-HS, P2-D7, P3- FS, P3-C5, P8-F4, P8-C2, P7-F12, P2-H7, P1-B7, P2-D9, P6-E8, P3-B9, P1-G1, P1-D11, P8-E3, P4-E4, PS-D12, P3-F4, P6-H2, P1-E9, P8-D9, and P4-G11 (FIG. 49) and said indinavir-complex binding domain comprises: i) a variable heavy (VH) domain comprising a vhCDR1, vhCDR2, and vhCDR3 sequence; ii) a variable light (VL) domain comprising a vlCDR1, vlCDR2, and vlCDR3 sequence; wherein said vhCDR1, vhCDR2 and vhCDR3 sequences and said vlCDR1, vlCDR2, and vlCDR3 sequences are selected from the group consisting of the vhCDR1, vhCDR2 and vhCDR3 sequences and the vlCDR1, vlCDR2, and vlCDR3 sequences from Fab001, Fab002, Fab003, Fab004, Fab005, Fab006, Fab007, Fab008, Fab009, Fab0010, Fab0011, Fab0012, Fab0013, Fab0014, Fab0015, Fab0016, Fab0017, Fab0018, Fab0019, Fab0020, Fab0021, and Fab0022 (FIG. 50); and wherein in the presence of indinavir said first and second iCID domains form a complex of said first iCID domain-indinavir-said second iCID domain, such that said T-LITE composition will bind both CD3 and said tumor.

### D. Formulations

[0415] The T-LITE™ and BrighT-LITE™ compositions used in the practice of the foregoing methods can be formulated into pharmaceutical compositions comprising a carrier suitable for the desired delivery method. Suitable carriers include any material that when combined with the therapeutic composition retains the therapeutic function of the therapeutic composition and is generally non-reactive with the patient's immune system. Examples include, but are not limited to, any of a number of standard pharmaceutical carriers such as sterile phosphate buffered saline solutions, bacteriostatic water, and the like (see, generally, Remington's Pharmaceutical Sciences 16^{th} Edition, A. Osal., Ed., 1980). Acceptable carriers, excipients, or stabilizers are nontoxic to recipients at the dosages and concentrations employed and may include buffers.

[0416] In some embodiments, the CC and CT binding proteins are formulated together in the same container. In some embodiments, the CC and CT binding proteins are formulated separately in different containers.

[0417] In some embodiments, the iCID small molecule is formulated separately from the CC and CT binding proteins. The iCID small molecule can be incorporated into a variety of formulations for therapeutic administration, for example, by combination with appropriate, pharmaceutically acceptable carriers or diluents to achieve the desired state in the subject being treated.

[0418] In some embodiments, the CC and CTCoS binding proteins are formulated together in the same container. In some embodiments, the CC and CTCoS binding proteins are formulated separately in different containers.

[0419] In some embodiments, the iCID small molecule is formulated separately from the CC and CTCoS binding proteins. The iCID small molecule can be incorporated into a variety of formulations for therapeutic administration, for example, by combination with appropriate, pharmaceutically acceptable carriers or diluents to achieve the desired state in the subject being treated.

[0420] In some embodiments, the CC and CTTCoS binding proteins are formulated together in the same container. In some embodiments, the CC and CTTCoS binding proteins are formulated separately in different containers.

[0421] In some embodiments, the iCID small molecule is formulated separately from the CC and CTTCoS binding proteins. The iCID small molecule can be incorporated into a variety of formulations for therapeutic administration, for example, by combination with appropriate, pharmaceutically acceptable carriers or diluents to achieve the desired state in the subject being treated.

### E. Methods of Making and Using the Compositions

[0422] The T-LITE™ and BrighT-LITE™ compositions described herein can find use in a number of therapeutic applications. Usually, a patient is a human, but non-human mammals including transgenic mammals can also be treated.

[0423] A method of making compositions described herein comprises the following steps: 1) an immunization campaign, 2) validation of murine indinavir binders, 3) humanization of the murine indinavir binders, 4) generation of a composition described herein and 5) validation of a composition described herein.

[0424] In some embodiments, the CC and CT binding proteins are formulated and administered together to a patient. In some embodiments, the CC and CT binding proteins are formulated separately and administered together to a patient after pre-administration mixing of the two. In some embodiments, the CC and CT binding proteins are formulated separately and administered sequentially to a patient. The route of administration can be, for example, intravenous.

[0425] Administration of an iCID small molecule to the same patient induces association of the CC and CT binding proteins, bringing together the tumor targeting antigen binding domain with the T cell engaging domain and forming an active T cell engaging complex. The iCID small molecule can be administered before, simultaneously with, or after the administration of the T-LITE™ compositions. The iCID small molecule may be administered multiple times or at varying doses to modulate the activity of the T cell engaging complex. To maintain the activity of the T cell engaging complexes (i.e., the association of the tumor targeting antigen domain with the T cell engaging domain), the patient can be dosed regularly with the iCID small molecule. The frequency of dosing depends on the iCID small molecule's serum half-life. The route of administration of an iCID small molecule can be, for example, oral, intravenous, subcutaneous, or intratumoral.

[0426] In the event that the patient needs to stop the activity of the T cell engaging complexes quickly, for example, due to safety concerns, the patient would stop being dosed with the iCID small molecule. This leads to clearance of the iCID small molecule, disassociation of the CC binding protein from the CT binding protein, and decoupling of the T cell from the target cell.

[0427] In some embodiments, the CC and CTCoS binding proteins are formulated and administered together to a patient. In some embodiments, the CC and CTCoS binding proteins are formulated separately and administered together to a patient after pre-administration mixing of the two. In some embodiments, the CC and CTCoS binding proteins are formulated separately and administered sequentially to a patient. The route of administration can be, for example, intravenous.

[0428] Administration of an iCID small molecule to the same patient induces association of the CC and CTCoS binding proteins, bringing together the tumor targeting antigen binding domain with the T cell engaging domain and forming an active T cell engaging complex. The iCID small molecule can be administered before, simultaneously with, or after the administration of the BrighT-LITE™ compositions. The iCID small molecule may be administered multiple times or at varying doses to modulate the activity of the T cell engaging complex. To maintain the activity of the T cell engaging complexes (i.e., the association of the tumor targeting antigen domain with the T cell engaging domain), the patient can be dosed regularly with the iCID small molecule. The frequency of dosing depends on the iCID small molecule's serum half-life. The route of administration of an iCID small molecule can be, for example, oral, intravenous, subcutaneous, or intratumoral.

[0429] In the event that the patient needs to stop the activity of the T cell engaging complexes quickly, for example, due to safety concerns, the patient would stop being dosed with the iCID small molecule. This leads to clearance of the iCID small molecule, disassociation of the CC binding protein from the CTCoS binding protein, and decoupling of the T cell from the target cell.

[0430] In some embodiments, the CC and CTTCoS binding proteins are formulated and administered together to a patient. In some embodiments, the CC and CTTCoS binding proteins are formulated separately and administered together to a patient after pre-administration mixing of the two. In some embodiments, the CC and CTTCoS binding proteins are formulated separately and administered sequentially to a patient. The route of administration can be, for example, intravenous.

[0431] Administration of an iCID small molecule to the same patient induces association of the CC and CTTCoS binding proteins, bringing together the tumor targeting antigen binding domains with the T cell engaging domain and forming an active T cell engaging complex. The iCID small molecule can be administered before, simultaneously with, or after the administration of the BrighT-LITE™ compositions. The iCID small molecule may be administered multiple times or at varying doses to modulate the activity of the T cell engaging complex. To maintain the activity of the T cell engaging complexes (i.e., the association of the tumor targeting antigen domain with the T cell engaging domain), the patient can be dosed regularly with the iCID small molecule. The frequency of dosing depends on the iCID small molecule's serum half-life. The route of administration of an iCID small molecule can be, for example, oral, intravenous, subcutaneous, or intratumoral.

[0432] In the event that the patient needs to stop the activity of the T cell engaging complexes quickly, for example, due to safety concerns, the patient would stop being dosed with the iCID small molecule. This leads to clearance of the iCID small molecule, disassociation of the CC binding protein from the CTTCoS binding protein, and decoupling of the T cell from the target cell.

[0433] The methods described above enable a precise temporal control of the activity of a T cell engaging complex in a patient, and the method is applicable to treat patients suffering from a variety of tumorous diseases or conditions. For example, a T-LITE or a BrighT-LITE comprising an αCD19-ABD can be used to treat patients suffering from CD19 expressing tumors, for example, most of B cell malignancies including but not limited to acute lymphoblastic leukemia (ALL), chronic lymphocytic leukemia (CLL) and B cell lymphomas.

[0434] Similarly, a T-LITE or a BrighT-LITE comprising an αEpCAM-ABD can be used to treat patients suffering from EpCAM expressing tumors. A T-LITE or a BrighT-LITE comprising an αHER2-ABD can be used to treat patients suffering from HER2 expressing tumors. A T-LITE or a BrighT-LITE comprising an α CD20-ABD can be used to treat patients suffering from CD20 expressing tumors.

[0435] In one aspect, the present disclosure relates to a method of treating cancer in a subject, comprising administering, to the subject, any one of the compositions described herein. For example, the composition described herein, including, but not limited to, a T-LITE or a BrighT-LITE comprising an αCD3-ABD, can be used to treat patients suffering from EpCAM expressing tumors.

[0436] Administration of the compositions described herein may be done in a variety of ways, including, but not limited to intravenously or locally.

[0437] The dosing amounts and frequencies of administration are, in a preferred embodiment, selected to be therapeutically or prophylactically effective. As is known in the art, dosages for any one patient depends on many factors, the age, body weight, general health, sex, diet, time and route of administration, drug interaction and the severity of the condition may be necessary.

[0438] In one aspect, the present disclosure relates to use of any one of the compositions described herein for treating cancer. In another aspect, the present disclosure relates to a kit comprising any one of the compositions described herein. In some embodiments, the kit is for treating cancer. In another aspect, the cancer described herein is a EpCAM expressing tumor.

### Examples

### LS2B Engineering

[0439] LS2B antibody clones derived from the phage display campaign were profiled by analytical UPLC-SEC using a Thermo Vanquish Flex HPLC with a MabPAC 4.6×150 mm SEC column equilibrated in 1×PBS-HCl at pH 7.0. Retention time of each clone was compared to Ab0254 to assess overall developability. Ab0310 (LS2B-C005) showed the best combination of binding and retention time (FIG. 15). However, the retention time was later than expected, suggesting that the hydrophobicity of the clone could be leading to interaction with the SEC column. This motivated protein engineering to ameliorate this liability.

[0440] In R1 of engineering, all Tyrosines and Tryptophans were individually mutated to Alanine or Serine to remove hydrophobicity as shown in Table 8 below.

TABLE 8

| | | | LS2A Ab0223 |
|---|---|---|---|
| Ab | Clone | Mutations | binding screen |
| Ab0272 | Clone5 | Parent for this set | ++++ |
| Ab0388 | R1M1 | HC: Y53S | ++++ |
| Ab0389 | R1M2 | HC: Y53A | ++++ |
| Ab0390 | R1M3 | HC: Y54S | ++ |
| Ab0391 | R1M4 | HC: Y54A | ++ |
| Ab0392 | R1M5 | HC: Y58S | ++++ |
| Ab0393 | R1M6 | HC: Y58A | ++++ |
| Ab0394 | R1M7 | HC: Y95S | +++ |
| Ab0395 | R1M8 | HC: Y95A | +++ |
| Ab0396 | R1M9 | HC: Y96S | ++ |
| Ab0397 | R1M10 | HC: Y96A | +++ |
| Ab0398 | R1M11 | HC: W98S | ++ |
| Ab0399 | R1M12 | HC: W98A | +++ |
| Ab0400 | R1M13 | HC: Y99S | ++ |
| Ab0401 | R1M14 | HC: Y99A | ++ |
| Ab0402 | R1M15 | HC: Y100aS | +++ |
| Ab0403 | R1M16 | HC: Y100aA | +++ |
| Ab0404 | RIM17 | HC: Y100bS | ++++ |
| Ab0405 | R1M18 | HC: Y100bA | ++++ |
| Ab0406 | R1M19 | HC: Y100dS | +++ |
| Ab0407 | R1M20 | HC: Y100dA | +++ |
| Ab0408 | R1M21 | HC: M100eA | +++ |
| Ab0409 | R1M22 | HC: M100eL | +++ |
| Ab0410 | R1M23 | HC: Y100gS | +++ |
| Ab0411 | R1M24 | HC: Y100gA | ++ |
| Ab0412 | R1M25 | HC: M100hA | ++ |
| Ab0413 | R1M26 | HC: M100hL | ++ |
| Ab0414 | R1M27 | HC: F100jA | ++ |

“++++ = Equivalent binding to parental”
“+++ = Slightly weaker binding than parental”

[0441] In R2 of engineering, all mutations that had negligible impact on binding were combined. Those mutational combinations that retained binding were then tested for retention time by UPLC-SEC as shown in Table 9 below.

TABLE 9

| | | | LS2A | | |
|---|---|---|---|---|---|
| | | | Ab0223 | SEC | |
| | | | binding | RT | TM |
| Ab | Clone | Mutations | screen | (min) | (° C.) |
| Ab0272 | Clone5 | Parent for this set | ++++ | 16.385 | 75.4 |
| Ab0441 | R2M1 | HC: Y96A + Y100bS | − | | |
| Ab0442 | R2M2 | HC: Y96A + Y100dA | − | | |
| Ab0443 | R2M3 | HC: Y96A + Y100gS | ++ | 16.327 | 77 |
| Ab0444 | R2M4 | HC: Y100bS + Y100dA | − | | |
| Ab0445 | R2M5 | HC: Y100bS + Y100gS | +++ | 14.737 | 78.3 |
| Ab0446 | R2M6 | HC: Y100dA + Y100gS | + | 15.137 | 76.8 |
| Ab0447 | R2M7 | HC: Y53A + Y96A | − | | |
| Ab0448 | R2M8 | HC: Y53A + Y100bS | − | | |
| Ab0449 | R2M9 | HC: Y53A + Y100dA | − | | |
| Ab0450 | R2M10 | HC: Y53A + Y100gS | +++ | 15.787 | 76.6 |
| Ab0451 | R2M11 | HC: Y96A + Y100bS + Y100dA | − | | |
| Ab0452 | R2M12 | HC: Y96A + Y100bS + Y100gS | + | 14.902 | 78.5 |
| Ab0453 | R2M13 | HC: Y96A + Y100dA + Y100gS | − | | |
| Ab0454 | R2M14 | HC: Y100bS + Y100dA + Y100gS | − | | |
| Ab0455 | R2M15 | HC: Y53A + Y96A + Y100bS | − | | |
| Ab0456 | R2M16 | HC: Y53A + Y96A + Y100dA | − | | |
| Ab0457 | R2M17 | HC: Y53A + Y96A + Y100gS | − | | |
| Ab0458 | R2M18 | HC: Y53A + Y100bS + Y100dA | − | | |
| Ab0459 | R2M19 | HC: Y53A + Y100bS + Y100gS | + | 14.662 | 78.1 |
| Ab0460 | R2M20 | HC: Y53A + Y100dA + Y100gS | − | | |
| Ab0461 | R2M21 | HC: Y96A + Y100bS + Y100dA + Y100gS | − | | |
| Ab0462 | R2M22 | HC: Y53A + Y96A + Y100bS + Y100dA | − | | |
| Ab0463 | R2M23 | HC: Y53A + Y96A + Y100bS + Y100gS | − | | |
| Ab0464 | R2M24 | HC: Y53A + Y96A + Y100dA + Y100gS | − | | |
| Ab0465 | R2M25 | HC: Y53A + Y100bS + Y100dA + Y100gS | − | | |
| Ab0466 | R2M26 | HC: Y53A + Y96A + Y100bS + Y100dA + Y100gS | − | | |
| Ab0467 | R2M27 | HC: Y53A + Y54A | − | | |
| Ab0468 | R2M28 | HC: Y95A + Y96A | +++ | 15.995 | 76.4 |
| Ab0469 | R2M29 | HC: Y100aS + Y100bS | − | | |
| Ab0470 | R2M30 | HC: Y100dA + M100eL | − | | |
| Ab0471 | R2M31 | HC: Y100gS + M100hL | ++++ | 16.095 | 75.6 |
| Ab0472 | R2M32 | HC: S30A | ++++ | 23.415 | 73.9 |
| Ab0478 | Trastuzumab | Antibody format matched control | N/A | 14.563 | 80.5 |

“++++ = Equivalent binding to parental”
“+++ = Slightly weaker binding than parental”
“++ = Much weaker binding than parental”
“+ = Very weak binding than parental”
“− = No binding”

[0442] Of those antibodies tested, Ab0445 was identified as having the best combination of binding retention time and thermal stability. In R3 of engineering, Ab0445 was used as the parental sequence and mutations were made to remove a putative glycosylation site in CDR H1 and remove potential tryptophan and methionine oxidation liabilities in CDR H3. A single point kinetic screen was performed against LS2A Ab0223+IDV, followed by 5-pt kinetics on a subset. SEC RT and melting temperatures were collected as shown in Tables 10.

TABLE 10

| | | | LS2A | LS2A | | |
|---|---|---|---|---|---|---|
| | | | Ab0223 | Ab0223 | | |
| | | | KD (nM) | KD (nM) | | |
| | | | 1-pt | 5-pt | SEC RT | TM |
| Ab | Clone | Mutations | kinetics | kinetics | (min) | (° C.) |
| Ab0272 | Clone5 | | 24 | 22 | | |
| Ab0445 | R2M5 | Parent for this set | 45 | 27 | 15.02 | 78.2 |
| Ab0595 | R3M1 | HC: S30A | 27 | NT | 17.65 | 77.1 |
| Ab0596 | R3M2 | HC: N28D | 15 | 14 | 16.53 | 77.9 |
| Ab0597 | R3M3 | HC: N28E | 15 | NT | 16.52 | 77.3 |
| Ab0600 | R3M6 | HC: N28T | 15 | NT | 17.32 | 76.7 |
| Ab0601 | R3M7 | HC: S30K | 18 | NT | 17.33 | 77.2 |
| Ab0602 | R3M8 | HC: V29I + S30K | 19 | NT | 17.71 | 78.3 |
| Ab0603 | R3M9 | HC: N28T + V29F | 7 | 7.6 | 17.06 | 77.8 |
| Ab0604 | R3M10 | HC: N28T + V29F + | 18 | NT | 19.55 | 80.2 |
| | | S33A + I34M + H35S | | | | |
| Ab0605 | R3M11 | HC: V29I + S30K + | NB | NT | 18.64 | 76 |
| | | S31D + Y32T + S33Y | | | | |
| Ab0606 | R3M12 | HC: W98L | NB | NT | 15.02 | 78.3 |
| Ab0607 | R3M13 | HC: W98F | poor fit | NT | 15.03 | 79.3 |
| Ab0608 | R3M14 | HC: W98Y | 220 | NT | 14.93 | 78.8 |
| Ab0609 | R3M15 | HC: W98H | 280 | NT | 14.84 | 78.5 |
| Ab0610 | R3M16 | HC: M100eL | 26 | 31 | 15.22 | 78.3 |
| Ab0611 | R3M17 | HC: M100hL | 14 | 22 | 14.96 | 77.3 |
| Ab0612 | R3M18 | HC: M100eL + M100hL | 44 | 31 | 15.20 | 77.5 |
| Ab0613 | R3M19 | HC: Y95S | NB | NT | 15.71 | 81.5 |
| Ab0614 | R3M20 | HC: Y100aS | NB | NT | 14.57 | 79.9 |

[0443] In R4a engineering, mutations combining promising findings from R3 were interrogated using Ab0596 as the parental sequence. Combining HC N28D+V29F+M100eL+M100hL (Ab0637) resulted in a molecule with a good kinetic profile and improved SEC RT as shown in Table 11 below.

TABLE 11

| | | | LS2A Ab0223 KD |
|---|---|---|---|
| Ab | Clone | Mutations | (nM) 5-pt kinetics |
| Ab0596 | R3M2 | Parent for this set | 14 |
| Ab0635 | R4M1 | HC: M100hL | NT |
| Ab0636 | R4M2 | HC: V29F + M100hL | NT |
| Ab0637 | R4M3 | HC: V29F + M100eL + | 5.9 |
| | | M100hL | |
| Ab0638 | R4M4 | HC: M100eL + M100hL | NT |

[0444] In R4b engineering, mutations were designed on top of the Ab1637 clone R4M3 to further improve hydrophobicity. Mutations were guided by AggScore calculations in the Schrodinger BioLuminate software. Ab698 clone R4M16 showed the most improved affinity and SEC profile as shown in Table 12 below.

TABLE 12

| | | | LS2A Ab0223 KD |
|---|---|---|---|
| Ab | Clone | Mutations | (nM) 3-pt kinetics |
| Ab0637 | R4M3 | Parent for this set | 5.4 |
| Ab0687 | R4M5 | HC: M100eA | 5.5 |
| Ab0688 | R4M6 | HC: Y53N | 29 |
| Ab0689 | R4M7 | HC: Y53D | 42 |
| Ab0690 | R4M8 | HC: Y53H | 11 |
| Ab0691 | R4M9 | HC: Y53K | NB |
| Ab0692 | R4M10 | HC: Y53S | 41 |
| Ab0693 | R4M11 | HC: Y54E | NB |
| Ab0694 | R4M12 | HC: Y54Q | NB |
| Ab0695 | R4M13 | HC: Y54H | NB |
| Ab0696 | R4M14 | HC: Y54K | NB |
| Ab0697 | R4M15 | HC: Y54S | NB |
| Ab0698 | R4M16 | HC: S100bD | 2.9 |
| Ab0699 | R4M17 | HC: S100bK | 33 |
| Ab0700 | R4M18 | HC: L100cA | NB |
| Ab0701 | R4M19 | HC: L100cN | NB |
| Ab0702 | R4M20 | HC: L100cD | NB |
| Ab0703 | R4M21 | HC: L100cH | NB |
| Ab0704 | R4M22 | HC: L100cK | NB |
| Ab0705 | R4M23 | HC: L100cS | NB |
| Ab0706 | R4M24 | HC: Y100dN | 89 |
| Ab0707 | R4M25 | HC: Y100dD | 72 |
| Ab0708 | R4M26 | HC: Y100dH | 37 |
| Ab0709 | R4M27 | HC: Y100dK | 30 |
| Ab0710 | R4M28 | HC: Y100dS | 60 |

TABLE 13

| | | | LS2A | | |
|---|---|---|---|---|---|
| | | | Ab0223 | SEC | |
| | | | KD (nM) | RT | TM |
| Ab | Clone | Mutations | 5-pt kinetics | (min) | (° C.) |
| Ab0637 | R4M3 | Parent for this set | 3.7 | 17.205 | 78.3 |
| Ab0687 | R4M5 | HC: M100eA | 6.4 | 16.188 | 79 |
| Ab0690 | R4M8 | HC: Y53H | 13 | 16.382 | 78.1 |
| Ab0698 | R4M16 | HC: S100bD | 1.7 | 15.095 | 79.1 |
| Ab0901 | R5M1 | HC: Y53H + | 6.6 | 14.813 | 78.9 |
| | | S100bD | | | |
| Ab0902 | R5M2 | HC: S100bD + | 1.6 | 14.798 | 79.4 |
| | | L100eA | | | |
| Ab0903 | R5M3 | HC: Y53H + | 8.1 | 14.548 | 79.1 |
| | | S100bD + | | | |
| | | L100eA | | | |
| Ab0654 | Trastuzumab | | N/A | 14.253 | 81.9 |

[0445] The culmination of these 5 rounds of engineering dramatically improved SEC retention times for LS2BL as observed in UPLC-SEC experiments (FIG. 16).

[0446] In the parallel optimization of the LS2A component, the preferred LS2A variant R3M1 (described below) showed loss of binding to LS2B3 R5M2 when compared to LS2A R2M34 (FIG. 17), with measured Kds of 2.4 nM and 79 nM respectfully by BLI. In R6 of engineering, alanine scanning of clone R4M16 were performed to find improved binding to LS2A R3M2 (Ab0787) and LS2A R3M1 (Ab0786). Variants were screened for binding to LS2A (Ab0223) and LS2A R3M2 (Ab0787) with a single-point kinetic screen. HC S50A mutation (Ab0936) was found to significantly improve binding affinity to Ab787 as shown in Table 14 below.

TABLE 14

| | | | LS2A | LS2A | LS2A | LS2A |
|---|---|---|---|---|---|---|
| | | | Ab0223 | Ab0787 | Ab0786 | Ab0787 |
| | | | KD (nM) | KD (nM) | KD (nM) | KD (nM) |
| | | | 1-pt | 1-pt | 1-pt | 5-pt |
| Ab | Clone | Mutations | kinetics | kinetics | kinetics | kinetics |
| Ab0698 | R4M16 | Parent for this set | 4 | poor fit | NT | 19 |
| Ab0935 | R6M1 | HC: Y32A | 230 | NB | NT | NT |
| Ab0936 | R6M2 | HC: S50A | <1.0 | 5.7 | NT | 1 |
| Ab0937 | R6M3 | HC: I51A | 2.2 | 42 | NT | NT |
| Ab0938 | R6M4 | HC: S52A | 310 | NB | NT | NT |
| Ab0939 | R6M5 | HC: P52aA | 3.7 | 40 | NT | NT |
| Ab0940 | R6M6 | HC: G55A | 10 | poor fit | NT | NT |
| Ab0941 | R6M7 | HC: S56A | 3.7 | 49 | NT | NT |
| Ab0942 | R6M8 | HC: E97A | 210 | NB | NT | NT |
| Ab0943 | R6M9 | HC: K100A | 130 | NB | NT | NT |
| Ab0944 | R6M10 | HC: D100bA | 7.1 | 100 | NT | NT |
| Ab0945 | R6M11 | HC: L100cA | NB | NB | NT | NT |
| Ab0946 | R6M12 | HC: G100iA | 50 | weak | NT | NT |
| Ab0947 | R6M13 | HC: D101A | 52 | weak | NT | NT |
| Ab0948 | R6M14 | HC: Y102A | 7.3 | poor fit | NT | NT |
| Ab0949 | R6M16 | LC: Q27A | 4.6 | poor fit | NT | NT |
| Ab0950 | R6M17 | LC: Y49A | 19 | poor fit | NT | NT |
| Ab0951 | R6M18 | LC: Y55A | 4 | poor fit | NT | NT |
| Ab0952 | R6M21 | LC: G91A | 6 | poor fit | NT | NT |
| Ab0953 | R6M22 | LC: G92A | 5.6 | 50 | NT | NT |
| Ab0954 | R6M23 | LC: Y93A | 23 | poor fit | NT | NT |
| Ab0955 | R6M24 | LC: S94A | 9.4 | poor fit | NT | NT |
| Ab0956 | R6M25 | LC: L95A | 64 | weak | NT | NT |
| Ab0957 | R6M26 | LC: I96A | 54 | weak | NT | NT |
| Ab0958 | R6M27 | LC: T97A | 4 | 42 | NT | NT |
| Ab0902 | R5M2 | Parent for this set | 5.9 | 33 | weak | NT |
| Ab1034 | R6M28 | HC: Y58A | NT | 16 | 93 | NT |
| Ab1035 | R6M29 | HC: Y95A | NT | weak | NB | NT |
| Ab1036 | R6M30 | HC: G100fS | NT | NB | NB | NT |
| Ab1037 | R6M31 | HC: Y58A + | NT | 38 | weak | NT |
| | | Y95A | | | | |
| Ab1038 | R6M32 | HC: Y58A + | NT | weak | NB | NT |
| | | G100fS | | | | |
| Ab1039 | R6M33 | HC: Y95A + | NT | NB | NB | NT |
| | | G100fS | | | | |
| Ab1040 | R6M34 | HC: Y58A + | NT | NB | NB | NT |
| | | Y95A + G100fS | | | | |
| Ab0903 | R5M3 | Parent for this set | 21 | weak | NB | NT |
| Ab1041 | R6M72 | HC: Y58A + | NT | NB | NB | NT |
| | | Y95A + G100fS | | | | |
| Ab1042 | R6M73 | HC: Y95A + | NT | NB | NB | NT |
| | | G100fS | | | | |
| Ab1043 | R6M74 | HC: Y58A + | NT | weak | NB | NT |
| | | G100fS | | | | |

[0447] In R7, combination mutants from R6 were designed to generate further affinity variants. Variants were screened for binding to LS2A Ab0787 and Ab0786 with a single-point kinetic screen. Five-point kinetics was measured for a subset of molecules. Clone LS2B3 R7M 1 and LS2B3 R7M2 demonstrated a K_{D} of 8.6 nM and 40 nM, respectively as shown in Table 15 below and (FIG. 17).

TABLE 15

| | | | LS2A | LS2A | LS2A | LS2A | |
|---|---|---|---|---|---|---|---|
| | | | Ab0787 | Ab0786 | Ab0787 | Ab0786 | |
| | | | KD (nM) | KD (nM) | KD (nM) | KD (nM) | |
| | | | 1-pt | 1-pt | 5-pt | 5-pt | TM |
| Ab | Clone | Mutations | kinetics | kinetics | kinetics | kinetics | (° C.) |
| Ab0902 | R5M2 | Parent for this set | 33 | weak | NT | NT | 77.2 |
| Ab1044 | R7M1 | HC: S50A | 5.1 | 8.2 | 2.3 | 8.6 | 78.3 |
| Ab1045 | R7M2 | HC: S50A + | 18 | 24 | 16 | 40 | 77.7 |
| | | W98Y | | | | | |
| Ab1046 | R7M3 | HC: S50A + | NB | NB | NT | NT | NT |
| | | Y58A + Y95A + | | | | | |
| | | G100fS | | | | | |
| Ab1047 | R7M4 | HC: S50A + | 47 | weak | NT | NT | NT |
| | | Y58A + Y95A | | | | | |
| Ab1048 | R7M5 | HC: S50A + | weak | NB | NT | NT | NT |
| | | Y95A + G100fS | | | | | |
| Ab1049 | R7M6 | HC: S50A + | 31 | NB | NT | NT | NT |
| | | Y58A + G100fS | | | | | |
| Ab1050 | R7M7 | HC: S50A + | NB | NB | NT | NT | NT |
| | | Y58A + Y95A + | | | | | |
| | | W98Y + G100fS | | | | | |
| Ab0903 | R5M3 | Parent for this set | weak | NB | NT | NT | NT |
| Ab1051 | R7M8 | HC: S50A | 18 | 160 | 11 | 55 | NT |
| Ab1052 | R7M9 | HC: S50A + | NB | NB | NT | NT | NT |
| | | Y58A + Y95A + | | | | | |
| | | G100fS | | | | | |
| Ab1053 | R7M10 | HC: S50A + | weak | NB | NT | NT | NT |
| | | Y58A + Y95A | | | | | |
| Ab1054 | R7M11 | HC: S50A + | NB | NB | NT | NT | NT |
| | | Y95A + G100fS | | | | | |
| Ab1055 | R7M12 | HC: S50A + | weak | NB | NT | NT | NT |
| | | Y58A + G100fS | | | | | |
| Ab0654 | Trastuzumab | | N/A | N/A | N/A | N/A | 78.6 |

### LS2A Engineering

[0448] The stability of LS2A scFv constructs was assessed prior and subsequent to initial humanization efforts with a low pH hold UPLC assay and DSF. While the murine parental Ab0188 showed expected resistance to low pH treatment, a significant amount of material was lost with Ab220 (FIG. 18). Ab0188 had a measured Tm of 59.2° C. while Ab0220 had a Tm of 51.4° C. (FIG. 19). These results motivated engineering efforts to improve the stability of humanized LS2A. The first round of engineering sought to improve stability through reformatting of the scFv. A Fab formatted construct was compared to an scFv with VH-VL or VL-VH orientation plus or minus a stabilizing disulfide (HC:G44C+LC:Q100C). Ab0220 remained the most optimal construct based on SEC RT and TM as shown in Table 16 below.

TABLE 16

| | | | SEC | |
|---|---|---|---|---|
| | | | RT | TM |
| Ab | LS2A format | Antibody Format | (min) | (° C.) |
| Ab0188 | Murine VH-VL scFv | monovalent scFv-Fc | 16.043 | 59.2 |
| Ab0220 | Humanized VH-VL scFv | monovalent scFv-Fc | 16.03 | 51.4 |
| Ab0368 | Humanized Fab | monovalent Fab-Fc | 17.523 | 66.1 |
| Ab0615 | Murine Fab | monovalent Fab-Fc | 16.385 | 73.6 |
| Ab0616 | Humanized VL-VH scFv | monovalent scFv-Fc | 17.392 | 52.2 |
| Ab0617 | Humanized VH-VL | monovalent scFv-Fc | 17.064 | 49.2 |
| | scFv + disulfide | | | |
| | (HC: G44C + | | | |
| | LC: Q100C) | | | |
| Ab0618 | Humanized VL-VH | monovalent scFv-Fc | 16.135 | 51.4 |
| | scFv + disulfide | | | |
| | (HC: G44C + | | | |
| | LC: Q100C) | | | |

[0449] In R1 of engineering, point mutations were made to remove an oxidation site, deamidation sites, or a hydrophobic residue. In addition, several murine back mutations were tested to improve humanization. Binding kinetics were measured to biotin-IDV and LS2B Ab0637. Ab0663 R1M8 demonstrated the best combination of kinetics and TM as shown in Table 17 below.

TABLE 17

| | | | biotin-IDV KD | LS2B Ab0637 KD | |
|---|---|---|---|---|---|
| | | | (nM) 3-pt | (nM) 3-pt | TM |
| Ab | Clone | Mutations | kinetics | kinetics | (° C.) |
| Ab0220 | | Parent molecule for this set | 69 | 8.9 | 52.4 |
| Ab0617 | | Disulfide (HC: G44C + LC: Q100C) | 24 | 59 | 50.5 |
| Ab0618 | | VL-VH orientation + disulfide | 35 | 33 | 55.2 |
| | | (HC: G44C + LC: Q100C) | | | |
| Ab0656 | R1M1 | HC: W33Y | poor fit | NB | 53.9 |
| Ab0657 | R1M2 | HC: N53S | poor fit | 31 | 53.5 |
| Ab0658 | R1M3 | LC: Y94D | weak | 14 | 53.8 |
| Ab0659 | R1M4 | LC: Y94S | poor fit | 120 | 54 |
| Ab0660 | R1M5 | LC: L95A | 93 | 12 | 55.3 |
| Ab0661 | R1M6 | LC: L95D | 130 | 35 | 54.4 |
| Ab0662 | R1M7 | LC: L95K | 100 | 6.8 | 55 |
| Ab0663 | R1M8 | LC: L95Q | 91 | 9.6 | 55.2 |
| Ab0664 | R1M9 | LC: L95S | poor fit | 16 | 57.6 |
| Ab0665 | R1M10 | LC: F96A | NB | 150 | 59.7 |
| Ab0666 | R1M11 | HC: T73K | 49 | 14 | 52.8 |
| Ab0667 | R1M12 | HC: V78A | weak | 9.8 | 51.7 |
| Ab0668 | R1M13 | LC: L47W | NT | NT | 49.7 |
| Ab0669 | R1M14 | LC: F71Y | poor fit | 12 | 51.3 |

[0450] In R2 of engineering, combinations of murine back mutations were made plus and minus disulfide stabilization mutations with an VH-VL to VL-VH orientation swap. A computational residue scanning approach was performed with the Schrodinger BioLuminate software. Several point mutations predicted to improve stability were also selected for evaluation. Kinetics and DSF experiments were performed as previously described. A Low pH hold assay was performed on a subset. Ab0759 R2M34 showed the best overall combination of kinetics, thermostability, and acid stability as shown in Table 18 below and FIG. 18.

TABLE 18

| | | | | | biotin- | LS2B | | |
|---|---|---|---|---|---|---|---|---|
| | | | | Yield | IDV | Ab0637 | | |
| | | | | from | KD (nM) | KD (nM) | | Acid |
| | | scFv | | 50 mL | 3-pt | 3-pt | TM | stability |
| Ab | Clone | Orientation | Mutations | (mg) | kinetics | kinetics | (° C.) | (% MP) |
| Ab0220 | | VH-VL | Humanized scFv (Parent molecule for this set) | | 200 | 5.3 | 52.4 | 33 |
| AB0188 | | VH-VL | Murine LS2A scFv | | 2 | NB | 59.2 | 86 |
| Ab0618 | | VL-VH | Disulfide (HC: G44C + LC: Q100C) | | 160 | 19 | 55.2 | 97 |
| Ab0663 | R1M8 | VH-VL | LC: L95Q | | 77 | 6 | 55.2 | 47 |
| Ab0726 | R2M1 | VL-VH | Disulfide + LC: L95Q | 0.18 | 42 | 15 | 57.8 | 69 |
| Ab0727 | R2M2 | VL-VH | Disulfide + HC: I50V + LC: L95Q | 0.18 | 170 | 150 | 50.0 | NT |
| Ab0728 | R2M3 | VH-VL | LC: S53N + R54L + T56S + L95Q | 0.26 | 73 | 9 | 55.9 | NT |
| Ab0729 | R2M4 | VH-VL | LC: S53N + R54L + T56S + I58V + D60A + | 0.29 | 74 | 9.1 | 55.9 | NT |
| | | | L95Q | | | | | |
| Ab0730 | R2M5 | VH-VL | LC: L47W + S53N + R54L + T56S + I58V + | 0.23 | 41 | 11 | 50.7 | NT |
| | | | D60A + L95Q | | | | | |
| Ab0731 | R2M6 | VL-VH | Disulfide + LC: S53N + R54L + T56S + | 0.24 | 40 | 50 | 60.0 | 84 |
| | | | L95Q | | | | | |
| Ab0732 | R2M7 | VL-VH | Disulfide + LC: S53N + R54L + T56S + | 0.24 | 42 | 90 | 60.2 | NT |
| | | | I58V + D60A + L95Q | | | | | |
| Ab0733 | R2M8 | VL-VH | Disulfide + LC: L47W + S53N + R54L + | 0.15 | 41 | 110 | 59.4 | NT |
| | | | T56S + I58V + D60A + L95Q | | | | | |
| Ab0734 | R2M9 | VH-VL | HC: I50M + S58N + LC: L95Q | 0.30 | 11 | weak | 59.5 | 90 |
| Ab0735 | R2M10 | VH-VL | HC: M48I + I50M + S58N + V67A + M69L + | 0.32 | 9.4 | weak | 59.7 | NT |
| | | | LC: L95Q | | | | | |
| Ab0736 | R2M11 | VL-VH | Disulfide + HC: I50M + S58N + LC: L95Q | 0.27 | 5.4 | weak | 60.7 | 91 |
| Ab0737 | R2M12 | VL-VH | Disulfide + HC: M48I + I50M + S58N + | | NT | NT | NT | NT |
| | | | V67A + M69L + LC: L95Q | | | | | |
| Ab0738 | R2M13 | VH-VL | HC: I50M + S58N + LC: S53N + R54L + | 0.34 | 9 | weak | 59.2 | 68 |
| | | | T56S + L95Q | | | | | |
| Ab0739 | R2M14 | VH-VL | HC: I50M + S58N + LC: S53N + R54L + | 0.30 | 11 | weak | 59.3 | NT |
| | | | T56S + I58V + D60A + L95Q | | | | | |
| Ab0740 | R2M15 | VH-VL | HC: I50M + S58N + LC: L47W + S53N + | 0.22 | 14 | weak | 56.8 | NT |
| | | | R54L + T56S + I58V + D60A + L95Q | | | | | |
| Ab0741 | R2M16 | VH-VL | HC: M48I + I50M + S58N + V67A + M69L + | 0.20 | 8.3 | weak | 59.4 | 98 |
| | | | LC: S53N + R54L + T56S + L95Q | | | | | |
| Ab0742 | R2M17 | VH-VL | HC: M48I + I50M + S58N + V67A + M69L + | 0.21 | 17 | weak | 59.6 | NT |
| | | | LC: S53N + R54L + T56S + I58V + D60A + | | | | | |
| | | | L95Q | | | | | |
| Ab0743 | R2M18 | VH-VL | HC: M48I + I50M + S58N + V67A + M69L + | 0.12 | 19 | NB | 49.3 | NT |
| | | | LC: L47W + S53N + R54L + T56S + I58V + | | | | | |
| | | | D60A + L95Q | | | | | |
| Ab0744 | R2M19 | VL-VH | Disulfide + HC: I50M + S58N + LC: S53N + | 0.13 | 21 | NB | 49.2 | NT |
| | | | R54L + T56S + L95Q | | | | | |
| Ab0745 | R2M20 | VL-VH | Disulfide + HC: I50M + S58N + LC: S53N + | 0.21 | 6.9 | weak | 60.9 | NT |
| | | | R54L + T56S + I58V + D60A + L95Q | | | | | |
| Ab0746 | R2M21 | VL-VH | Disulfide + HC: I50M + S58N + LC: L47W + | 0.12 | 6 | weak | 60.0 | NT |
| | | | S53N + R54L + T56S + I58V + D60A + L95Q | | | | | |
| Ab0747 | R2M22 | VL-VH | Disulfide + HC: M48I + I50M + S58N + | 0.17 | 7.7 | weak | 60.3 | 89 |
| | | | V67A + M69L + LC: S53N + R54L + T56S + | | | | | |
| | | | L95Q | | | | | |
| Ab0748 | R2M23 | VL-VH | Disulfide + HC: M48I + I50M + S58N + | 0.19 | 8.1 | weak | 60.5 | NT |
| | | | V67A + M69L + LC: S53N + R54L + T56S + | | | | | |
| | | | I58V + D60A + L95Q | | | | | |
| Ab0749 | R2M24 | VL-VH | Disulfide + HC: M48I + I50M + S58N + | 0.13 | 9.7 | weak | 59.8 | NT |
| | | | V67A + M69L + LC: L47W + S53N + R54L + | | | | | |
| | | | T56S + I58V + D60A + L95Q | | | | | |
| Ab0750 | R2M25 | VH-VL | HC: M48I + LC: L95Q | 0.29 | 83 | 8 | 55.7 | NT |
| Ab0751 | R2M26 | VH-VL | HC: V67A + M69L + LC: L95Q | 0.16 | 91 | 9.6 | 51.1 | NT |
| Ab0752 | R2M27 | VH-VL | HC: M48I + V67A + M69L + LC: L95Q | | NT | NT | NT | NT |
| Ab0753 | R2M28 | VH-VL | HC: R71V + LC: L95Q | 0.22 | 270 | 12 | 55.4 | NT |
| Ab0754 | R2M29 | VH-VL | HC: R71V + T73K + LC: L95Q | | NT | NT | NT | NT |
| Ab0755 | R2M30 | VH-VL | HC: R71V + T73K + V78A + LC: L95Q | 0.26 | 58 | 10 | 56.1 | NT |
| Ab0756 | R2M31 | VH-VL | HC: M48I + V67A + M69L + R71V + | 0.36 | 290 | 19 | 56.8 | NT |
| | | | T73K + LC: L95Q | | | | | |
| Ab0757 | R2M32 | VH-VL | HC: M48I + V67A + M69L + R71V + | 0.39 | weak | 12 | 57.9 | NT |
| | | | T73K + V78A + LC: L95Q | | | | | |
| Ab0758 | R2M33 | VH-VL | HC: A40R + LC: L95Q | 0.34 | 280 | 5.7 | 57.1 | NT |
| Ab0759 | R2M34 | VH-VL | HC: A40H + LC: L95Q | 0.33 | 140 | 6.1 | 60.4 | 92 |
| Ab0760 | R2M35 | VH-VL | LC: S76H + L95Q | 0.30 | 100 | 9 | 52.7 | NT |
| Ab0761 | R2M36 | VH-VL | LC: A43H + L95Q | 0.29 | 220 | 10 | 51.9 | NT |
| Ab0762 | R2M37 | VH-VL | HC: G44H + LC: L95Q | 0.32 | 110 | 9.1 | 53.1 | NT |
| Ab0763 | R2M38 | VH-VL | HC: G44R + LC: L95Q | 0.27 | 220 | 13 | 52.9 | NT |

[0451] In R3 of engineering HC I50M and/or S58N mutations were combined onto clone LS2A R2M34 to improve stability and affinity. Thermostability was improved for Clones R3M1 and R3M2 containing the I50M mutation as shown in Tables 19 and 20 below, and FIG. 19.

TABLE 19

| | | | | LS2B Ab0670 KD | TM |
|---|---|---|---|---|---|
| Ab | Clone | Mutation | Antibody Format | (nM) 5-pt kinetics | (° C.) |
| Ab0785 | R2M34 | Parent for this set | Fab, His-Tag, Avi-Tag | 29 | 70.9 |
| Ab0786 | R3M1 | HC: I50M + S58N | Fab, His-Tag, Avi-Tag | weak | 74.2 |
| Ab0787 | R3M2 | HC: I50M | Fab, His-Tag, Avi-Tag | weak | 74.6 |
| Ab0788 | R3M3 | HC: S58N | Fab, His-Tag, Avi-Tag | 86 | 70.1 |

TABLE 20

| | | | | Free IDV | LS2B Ab1073 | |
|---|---|---|---|---|---|---|
| | | | Antibody | KD (nM) | KD (nM) | TM |
| Ab | Clone | Mutation | Format | 5-pt kinetics | 5-pt kinetics | (° C.) |
| Ab0898 | R2M34 | Parent for this set | scFv-Fc | NT | NT | 52.5 |
| Ab0899 | R3M1 | HC: I50M + S58N | scFv-Fc | 4.6 | 12 | 56.1 |
| Ab0900 | R3M2 | HC: I50M | scFv-Fc | NT | NT | 57.1 |

[0452] Affinity of Ab0899 clone R3M 1 to free Indinavir was measured by SPR to be 4.6 nM. Clone R3M1 demonstrated weak binding to Ab0670 LS2B clone R3M2 (TABLE 19), but improved 12 nM K_{D} to Ab1073 LS2B clone R7M2 (TABLE 20 and FIG. 17). In R4 of engineering, mutations were made to weaken the affinity to Indinavir or to improve the thermostability of LS2A. Stability mutations were again guided by in silico residue scanning with the Schrodinger BioLuminate software. Ab1126 R4M32 showed a particularly interesting combination of weakened Indinavir binding with an unaltered LS2B binding and TM relative to the parental molecule Ab 1094 as shown in Table 21 below.

TABLE 21

| | | | | LS2B | |
|---|---|---|---|---|---|
| | | | biotin-IDV | Ab1073 | |
| | | | KD | KD | TM |
| Ab | Clone | Mutations | (nM) | (nM) | (° C.) |
| Ab1094 | R3M1 | Parent | 4.4 | 16 | 58.9 |
| Ab1095 | R4M1 | HC: W33A | 14 | weak | 55.9 |
| Ab1096 | R4M2 | HC: W33F | 15 | NT | 54.8 |
| Ab1097 | R4M3 | HC: W33H | 16 | NT | 54.8 |
| Ab1098 | R4M4 | HC: W33L | 16 | NT | NT |
| Ab1099 | R4M5 | HC: H35A | 140 | NT | NT |
| Ab1100 | R4M6 | HC: H52N | 74 | NB | NT |
| Ab1101 | R4M7 | HC: H52A | 74 | NB | 54.9 |
| Ab1102 | R4M8 | HC: R100A | weak | 20 | 65.4 |
| Ab1103 | R4M9 | HC: N53A | 11 | NT | NT |
| Ab1104 | R4M10 | HC: N53S | 9.1 | 93 | 59.2 |
| Ab1105 | R4M11 | HC: N53Q | 11 | NT | 59.6 |
| Ab1106 | R4M12 | HC: S54A | 6.5 | NT | 54.1 |
| Ab1107 | R4M13 | HC: I51A | weak | NT | NT |
| Ab1108 | R4M14 | HC: G55A | 11 | NT | NT |
| Ab1109 | R4M15 | HC: G56S | 6.3 | NT | NT |
| Ab1110 | R4M16 | HC: T57A | 4.9 | NT | NT |
| Ab1111 | R4M17 | HC: G95A | 27 | 19 | 56.9 |
| Ab1112 | R4M18 | HC: D96A | poor fit | NT | NT |
| Ab1113 | R4M19 | HC: Y97A | 66 | NB | NT |
| Ab1114 | R4M20 | HC: V98A | 50 | weak | 59.9 |
| Ab1115 | R4M21 | HC: S99A | 19 | NT | NT |
| Ab1116 | R4M22 | HC: D101A | NB | NB | NT |
| Ab1117 | R4M23 | HC: Y102A | 57 | 13 | 57.5 |
| Ab1118 | R4M24 | HC: S31A | 20 | NT | NT |
| Ab1119 | R4M25 | HC: Y32A | 120 | NB | NT |
| Ab1120 | R4M26 | HC: K12Q | 34 | NT | NT |
| Ab1121 | R4M27 | HC: K23I | 43 | 11 | 54.7 |
| Ab1122 | R4M28 | HC: D101L | NB | NB | NT |
| Ab1123 | R4M29 | HC: T68Q | 13 | NT | NT |
| Ab1124 | R4M30 | LC: Y91A | 22 | NT | NT |
| Ab1125 | R4M31 | LC: Y91F | 44 | poor fit | 58 |
| Ab1126 | R4M32 | LC: Y94A | 64 | 26 | 59.1 |
| Ab1127 | R4M33 | LC: F96L | NB | NT | NT |
| Ab1128 | R4M34 | LC: S92A | 37 | NT | NT |
| Ab1129 | R4M35 | LC: G93A | 30 | NT | NT |
| Ab1130 | R4M36 | LC: T97A | 36 | NT | NT |
| Ab1131 | R4M37 | LC: H34A | 12 | NT | NT |
| Ab1132 | R4M38 | LC: Y32A | 17 | NT | NT |

[0453] Ab1126 R4M32 also showed comparable T-cell activation and T-cell mediated cellular cytotoxicity in an in vitro co-culture assay (FIG. 25).

### LITE Switch Characterization

[0454] A series of biophysical experiments was conducted to further elucidate a mechanism for Indinavir switch assembly. Biolayer interferometry experiments were performed to measure LS2A and LS21B assembly in the presence and absence of saturating concentrations of Indinavir. Ab0223 demonstrated an affinity of 1.6 nM for binding to Ab0902 in the presence of 10 μM IDV but showed no detectable interaction in the absence of Indinavir (FIG. 23). To estimate the size and relative stoichiometries of the assembled LS2A/Indinavir/LS2B complex, Ab0220 and Ab0445 were analyzed separately or in combination by UPLC-SEC using a MabPAC 4.6×150 mm column pre-equilibrated with 1×PBS-HCl at pH 7.0 and 10 μM Indinavir. Relative to the proteins analyzed separately, the combination of Ab0220/Ab0445 eluted at an earlier retention time consistent with a heterodimeric complex (FIG. 22). A BLI kinetics assay was performed to assess the reversibility kinetics of the LS2A/LS2B complex upon Indinavir washout. Data showed that when concentrations of Ab1073 and IDV remained constant, no LITE Switch reversibility was observed. In 2 hours of IDV washout, the LITE Switch dissociated to nearly 0% complex, whereas complete complex dissociation was observed in 10 min upon removal of both Ab1073 and IDV (FIG. 21).

### SP34 Engineering

[0455] The previously described murine CD3 binding clone, SP34, was humanized. SP34 was humanized by grafting CDR sequences onto various human frameworks including IGHV3-73*01, IGHV3-23*03, IGHV7-4-1*04, IGHV1-46*02, IGLV7-43*01, IGLV8-61*01, IGLV1-51*01, IGLV2-8*01, IGKV3D-11*03, IGKV1-6*01, and IGKV4-1*01. Back mutations on these frameworks were also explored. 73 designs were first tested for expression in Expi293F cells using a BLI supernatant quantitation assay. 18 out of the 73 designs showed detectable expression levels (FIG. 28). 9 of those 18 designs showed detectable binding to CD3E CD3e ECD by BLI (FIG. 29). Five-point kinetics to the human (Ag0052) and cyno (Ag0052) CD3e N-terminal peptide AA1-26 fused to a human IgG1 Fc were measured for a subset of the variants as shown in Table 22 below.

TABLE 22

| | | huCD3e | huCD3e | cyCD3e |
|---|---|---|---|---|
| | | ECD BLI | peptide-Fc | peptide-Fc |
| | | binding | Ag0052 KD (nM) | Ag0052 KD (nM) |
| Ab | Clone | screen | 5-pt kinetics | 5-pt kinetics |
| Ab0486 | hSP34v1 | Yes | NT | NT |
| Ab0487 | hSP34v2 | No | NT | NT |
| Ab0488 | hSP34v3 | No | NT | NT |
| Ab0489 | hSP34v4 | No | NT | NT |
| Ab0490 | hSP34v5 | Yes | 330 | 320 |
| Ab0491 | hSP34v6 | No | NT | NT |
| Ab0492 | hSP34v7 | No | NT | NT |
| Ab0493 | hSP34v8 | No | NT | NT |
| Ab0494 | hSP34v9 | No | NT | NT |
| Ab0495 | hSP34v10 | No | NT | NT |
| Ab0496 | hSP34v11 | No | NT | NT |
| Ab0497 | hSP34v12 | Yes | 180 | 170 |
| Ab0498 | hSP34v13 | No | NT | NT |
| Ab0499 | hSP34v14 | Yes | 53 | 50 |
| Ab0500 | hSP34v15 | No | NT | NT |
| Ab0501 | hSP34v16 | No | NT | NT |
| Ab0502 | hSP34v17 | No | NT | NT |
| Ab0503 | hSP34v18 | No | NT | NT |
| Ab0504 | hSP34v19 | No | NT | NT |
| Ab0505 | hSP34v20 | No | NT | NT |
| Ab0506 | hSP34v21 | Yes | 420 | 540 |
| Ab0507 | hSP34v22 | No | NT | NT |
| Ab0508 | hSP34v23 | No | NT | NT |
| Ab0509 | hSP34v24 | No | NT | NT |
| Ab0510 | hSP34v25 | No | NT | NT |
| Ab0511 | hSP34v26 | No | NT | NT |
| Ab0512 | hSP34v27 | No | NT | NT |
| Ab0513 | hSP34v28 | No | NT | NT |
| Ab0514 | hSP34v29 | Yes | 55 | 50 |
| Ab0515 | hSP34v30 | No | NT | NT |
| Ab0516 | hSP34v31 | No | NT | NT |
| Ab0517 | hSP34v32 | No | NT | NT |
| Ab0518 | hSP34v33 | No | NT | NT |
| Ab0519 | hSP34v34 | No | NT | NT |
| Ab0520 | hSP34v35 | No | NT | NT |
| Ab0521 | hSP34v36 | No | NT | NT |
| Ab0522 | hSP34v37 | No | NT | NT |
| Ab0523 | hSP34v38 | No | NT | NT |
| Ab0524 | hSP34v39 | No | NT | NT |
| Ab0525 | hSP34v40 | No | NT | NT |
| Ab0526 | hSP34v41 | No | NT | NT |
| Ab0527 | hSP34v42 | No | NT | NT |
| Ab0528 | hSP34v43 | No | NT | NT |
| Ab0529 | hSP34v44 | No | NT | NT |
| Ab0530 | hSP34v45 | No | NT | NT |
| Ab0531 | hSP34v46 | No | NT | NT |
| Ab0532 | hSP34v47 | No | NT | NT |
| Ab0533 | hSP34v48 | No | NT | NT |
| Ab0534 | hSP34v49 | No | NT | NT |
| Ab0535 | hSP34v50 | Yes | 230 | 240 |
| Ab0536 | hSP34v51 | No | NT | NT |
| Ab0537 | hSP34v52 | No | NT | NT |
| Ab0538 | hSP34v53 | No | NT | NT |
| Ab0539 | hSP34v54 | No | NT | NT |
| Ab0540 | hSP34v55 | No | NT | NT |
| Ab0541 | hSP34v56 | No | NT | NT |
| Ab0542 | hSP34v57 | No | NT | NT |
| Ab0543 | hSP34v58 | Yes | 560 | 270 |
| Ab0544 | hSP34v59 | No | NT | NT |
| Ab0545 | hSP34v60 | No | NT | NT |
| Ab0546 | hSP34v61 | No | NT | NT |
| Ab0547 | hSP34v62 | No | NT | NT |
| Ab0548 | hSP34v63 | No | NT | NT |
| Ab0549 | hSP34v64 | No | NT | NT |
| Ab0550 | hSP34v65 | No | NT | NT |
| Ab0551 | hSP34v66 | No | NT | NT |
| Ab0552 | hSP34v67 | No | NT | NT |
| Ab0553 | hSP34v68 | Yes | 200 | 180 |
| Ab0554 | hSP34v69 | No | NT | NT |
| Ab0555 | hSP34v70 | No | NT | NT |
| Ab0556 | hSP34v71 | No | NT | NT |
| Ab0557 | hSP34v72 | No | NT | NT |
| Ab0558 | hSP34v73 | No | NT | NT |
| Ab0559 | murine | Yes | 18 | 21 |
| | SP34 | | | |

[0456] A subset of these confirmed binders were re-formatted into an EpCAM T-cell Engager format and tested for T-cell activation and T-cell mediated cellular cytotoxicity in an in vitro co-culture assay. All variants were tested in a T-cell dependent cellular cytotoxicity (TDCC) co-culture assay to measure the ability to redirect T cells to kill target cells, and the ability to activate T cells. MCF-7, a human breast cancer cell line, endogenously expresses high levels of EpCAM (Casaletto et al 2019; doi: 10.1073/pnas. 1819085116), was used as the target cells. All SP34 variants showed potent T-cell activation and TDCC at low pM concentrations (FIG. 30).

[0457] The binding of the preferred clone hSP34v68 was assessed for binding to human and cyno PBMCs by flow-cytometry-based cell-surface staining. Detectable and saturable binding to human and cyno TCRab+ cells, TCRab+ CD4+ CD8− cells, and TCRab+ CD34− CD8+ cells was observed (FIG. 32). Pharmacokinetic properties of Ab640 hSP34v68 in mice were also assessed and compared to an isotype matched control with the Ab632 Herceptin clone. hSP34v68 at a dose of 6.7 mg/kg demonstrated a half-life of 112 h and a CL of 18.6 mL/kg/day (FIG. 31).

[0458] Using hSP34v68 as a starting point for R1 of engineering, mutations were designed to improve the humanization, modulate the affinity, and remove potential liabilities in clone hSP34v68. Affinity to the human CD3e N-terminal peptide AA1-26 fused to a human IgG1 Fc (Ag0060) was measured by SPR and thermostability was measured for a subset by DSF as shown in Table 23 below.

TABLE 23

| | | | huCD3e peptide-Fc | |
|---|---|---|---|---|
| | | | Ag0060 KD (nM) | TM |
| Ab | Clone | Mutation | 5-pt kinetics | (° C.) |
| Ab0640 | v68 | Parent | 250 | 60.7 |
| Ab0769 | v68-1 | HC: A49G | NT | 61.7 |
| Ab0770 | v68-2 | HC: G96K | NT | 61.0 |
| Ab0771 | v68-3 | LC: P8delete | NT | 55.8 |
| Ab0772 | v68-4 | LC: L54R | 250 | 62.4 |
| Ab0773 | v68-5 | LC: S56P | 85 | 63.4 |
| Ab0774 | v68-6 | LC: L54R + S56P | 98 | 63.9 |
| Ab0775 | v68-7 | HC: A49G + LC: L54R + S56P | 63 | 64.1 |
| Ab0776 | v68-8 | HC: G96K + LC: L54R + S56P | 110 | 63.8 |
| Ab0907 | v68-9 | HC: N30S + LC: L54R + S56P | 230 | NT |
| Ab0908 | v68-10 | HC: T31A + LC: L54R + S56P | NT | NT |
| Ab0909 | v68-11 | HC: Y32A + LC: L54R + S56P | NB | NT |
| Ab0910 | v68-12 | HC: R52S + LC: L54R + S56P | NB | NT |
| Ab0911 | v68-13 | HC: N53S + LC: L54R + S56P | 480 | NT |
| Ab0912 | v68-14 | HC: N53Q + LC: L54R + S56P | 660 | NT |
| Ab0913 | v68-15 | HC: N54A + LC: L54R + S56P | 130 | NT |
| Ab0914 | v68-16 | HC: N54Q + LC: L54R + S56P | 140 | NT |
| Ab0915 | v68-17 | HC: N100S + LC: L54R + S56P | 250 | NT |
| Ab0916 | v68-18 | HC: N100Q + LC: L54R + S56P | 240 | NT |
| Ab0917 | v68-19 | HC: S100aA + LC: L54R + S56P | 1300 | NT |
| Ab0918 | v68-20 | HC: Y100bA + LC: L54R + S56P | 220 | NT |
| Ab0919 | v68-21 | HC: V100cA + LC: L54R + S56P | 860 | NT |
| Ab0920 | v68-22 | HC: S100dA + LC: L54R + S56P | 2700 | NT |
| Ab0921 | v68-23 | HC: W100eY + LC: L54R + S56P | 100 | NT |
| Ab0922 | v68-24 | LC: T29A + L54R + S56P | NT | NT |
| Ab0923 | v68-25 | LC: S30A + L54R + S56P | NT | NT |
| Ab0924 | v68-26 | LC: Y32A + L54R + S56P | Weak | NT |
| Ab0925 | v68-27 | LC: N52S + L54R + S56P | 100 | NT |
| Ab0926 | v68-28 | LC: K52S + L54R + S56P | 200 | NT |
| Ab0927 | v68-29 | LC: L54R + S56P + W91Y | 2200 | NT |
| Ab0928 | v68-30 | LC: L54R + S56P + S93A | 180 | NT |
| Ab0929 | v68-31 | LC: L54R + S56P + N94A | 240 | NT |
| Ab0930 | v68-32 | LC: L54R + S56P + W96Y | NT | NT |

[0459] In R2 of engineering, mutations were combined to modulate the affinity and remove potential deamidation sites. Kinetics for binding CD3E of the variants was measured by SPR. Thermostability was also measured as shown in Table 24 below.

TABLE 24

| | | | huCD3e peptide-Fc | |
|---|---|---|---|---|
| | | | Ag0060 KD (nM) 5- | TM |
| Ab | Clone | Mutation | pt kinetics | (° C.) |
| Ab1091 | v68-5 | Parent | 190 | 62.2 |
| Ab1133 | v68-33 | HC: N54A | 190 | 62.1 |
| Ab1134 | v68-34 | HC: N30S | 300 | 63.7 |
| Ab1135 | v68-35 | HC: N53S | 520 | 61.5 |
| Ab1136 | v68-36 | HC: N53Q | 610 | 62.5 |
| Ab1137 | v68-37 | HC: S100aA | 660 | 63 |

### EpCAM Engineering

[0460] Through a hybridoma campaign where mice were immunized with an EpCAM ECD Fc-fusion, the murine EpCAM binding antibody clone M37 was produced. Clone M37 was humanized by grafting CDR sequences onto human consensus VH3 and VK1 frameworks. Various combinations of back mutations (HC: S49A N73D N76S L78V A93T R94L and LC: I2N L47W F71Y) were tested to find optimal binding kinetics and stability. Of these designs, clone hM37-H6L2 (Ab0835) demonstrated the highest affinity to

human (Ag0065;
QEECVCENYKLAVNCFVNNNRQCQCTSVGAQNTVICSKLAAKCLVMKAE
MNGSKLGRRAKPEGALQNNDGLYDPDCDESGLFKAKQCNGTSTCWCVNT
AGVRRTDKDTEITCSERVRTYWIIIELKHKAREKPYDSKSLRTALQKEI
TTRYQLDPKFITSILYENNVITIDLVQNSSQKTQNDVDIADVAYYFEKD
VKGESLFHSKKMDLTVNGEQLDLDPGQTLIYYVDEKAPEFSMQGLKHHH
HHH; SEQ ID NO: 3838)
and
cyno (Ag0066;
QKECVCENYKLAVNCFLNDNGQCQCTSIGAQNTVLCSKLAAKCLVMKAE
MNGSKLGRRAKPEGALQNNDGLYDPDCDESGLFKAKQCNGTSTCWCVNT
AGVRRTDKDTEITCSERVRTYWIIIELKHKAREKPYDVQSLRTALEEAI
KTRYQLDPKFITNILYEDNVITIDLVQNSSQKTQNDVDIADVAYYFEKD
VKGESLFHSKKMDLRVNGEQLDLDPGQTLIYYVDEKAPEFSMQGLKHHH
HHH; SEQ ID NO: 3839)

EpCAM ECD as shown in Table 25 below.

TABLE 25

| | | huEpCAM | cyEpCAM | huEpCAM | cyEpCAM | |
|---|---|---|---|---|---|---|
| | | ECD | ECD | ECD | ECD | |
| | | Ag0065 | Ag0066 | Ag0065 | Ag0066 | |
| | | KD (nM) | KD (nM) | KD (nM) | KD (nM) | |
| | | 5-pt | 5-pt | 5-pt | 5-pt | |
| | | single- | single- | multi- | multi- | |
| | | cycle | cycle | cycle | cycle | TM |
| Ab | Clone | kinetics | kinetics | kinetics | kinetics | (° C.) |
| Ab0588 | MOC31 | 3.5 | NB | NT | NT | NT |
| Ab0682 | M37 | 5.7 | 7.3 | NT | NT | NT |
| Ab0823 | M37 | NT | NT | 11.0 | 7.6 | 68.5 |
| Ab0824 | hM37-H1L1 | Weak | Weak | NT | NT | NT |
| Ab0825 | hM37-H2L1 | 6.4 | 6.9 | NT | NT | NT |
| Ab0826 | hM37-H3L1 | Weak | Weak | NT | NT | NT |
| Ab0827 | hM37-H4L1 | 11.4 | 6.0 | NT | NT | NT |
| Ab0828 | hM37-H5L1 | 4.8 | 2.5 | NT | NT | NT |
| Ab0829 | hM37-H6L1 | NT | NT | NT | NT | NT |
| Ab0830 | hM37-H1L2 | Weak | Weak | NT | NT | NT |
| Ab0831 | hM37-H2L2 | 6.4 | 6.1 | NT | NT | NT |
| Ab0832 | hM37-H3L2 | Weak | Weak | NT | NT | NT |
| Ab0833 | hM37-H4L2 | 6.4 | 6.3 | NT | NT | NT |
| Ab0834 | hM37-H5L2 | 4.4 | 2.2 | NT | NT | NT |
| Ab0835 | hM37-H6L2 | 2.7 | 1.5 | 3.0 | 2.2 | 74.0 |
| Ab0836 | hM37-H1L3 | Weak | Weak | NT | NT | NT |
| Ab0837 | hM37-H2L3 | 6.6 | 7.5 | NT | NT | NT |
| Ab0838 | hM37-H3L3 | Weak | Weak | NT | NT | NT |
| Ab0839 | hM37-H4L3 | 6.7 | 8.8 | NT | NT | NT |
| Ab0840 | hM37-H5L3 | 5.5 | 3.8 | NT | NT | NT |
| Ab0841 | hM37-H6L3 | 4.1 | 2.5 | NT | NT | NT |
| Ab0842 | hM37-H1L4 | Weak | Weak | NT | NT | NT |
| Ab0843 | hM37-H2L4 | 9.9 | 8.7 | NT | NT | NT |
| Ab0844 | hM37-H3L4 | Weak | Weak | NT | NT | NT |
| Ab0845 | hM37-H4L4 | 8.9 | 8.8 | NT | NT | NT |
| Ab0846 | hM37-H5L4 | 6.2 | 6.3 | NT | NT | NT |
| Ab0847 | hM37-H6L4 | 5.7 | 4.3 | NT | NT | NT |

[0461] Once M37 was successfully humanized, additional engineering was conducted to further improve the construct. In R1 of engineering, mutations were designed to remove potential oxidation or isomerization liabilities. Stability mutants were also included based on in silico residue scanning results in the Schrodinger BioLuminate software. The affinity of hM37-H6L2 variants to Ag0065 and Ag0066 were measured by SPR and thermostability was measured for a subset by DSF as shown in Table 26 below.

TABLE 26

| | | | huEpCAM | cyEpCAM | huEpCAM | cyEpCAM | |
|---|---|---|---|---|---|---|---|
| | | | ECD | ECD | ECD | ECD | |
| | | | Ag0065 | Ag0066 | Ag0065 | Ag0066 | |
| | | | KD (nM) | KD (nM) | KD (nM) | KD (nM) | |
| | | | 5-pt | 5-pt | 5-pt | 5-pt | |
| | | | single- | single- | multi- | multi- | |
| | | | cycle | cycle | cycle | cycle | TM |
| Ab | Clone | Mutation | kinetics | kinetics | kinetics | kinetics | (° C.) |
| Ab0835 | hM37-H6L2 | Parent for | 3.0 | poor fit | 2.3 | 1.7 | 70.2 |
| | | this set | | | | | |
| Ab1008 | hM37-H6L2v1 | HC: D73N | 11.0 | 8.0 | NT | NT | NT |
| Ab1009 | hM37-H6L2v2 | HC: S76N | 3.1 | 2.2 | 2.3 | 1.4 | 70.7 |
| Ab1010 | hM37-H6L2v3 | HC: T93A | 8.5 | 2.0 | NT | NT | NT |
| Ab1011 | hM37-H6L2v4 | HC: L94R | poor fit | 9.9 | NT | NT | NT |
| Ab1012 | hM37-H6L2v5 | HC: N31S | 9.7 | 6.2 | NT | NT | NT |
| Ab1013 | hM37-H6L2v6 | HC: W33A | poor fit | poor fit | NT | NT | NT |
| Ab1014 | hM37-H6L2v7 | HC: W33F | NT | NT | NT | NT | NT |
| Ab1015 | hM37-H6L2v8 | HC: W33H | poor fit | poor fit | NT | NT | NT |
| Ab1016 | hM37-H6L2v9 | HC: W33Y | 7.2 | 7.7 | NT | NT | NT |
| Ab1017 | hM37-H6L2v10 | HC: N35S | 7.6 | 4.5 | NT | NT | NT |
| Ab1018 | hM37-H6L2v11 | HC: D96E | 3.0 | 2.1 | 2.8 | 1.6 | 69.9 |
| Ab1019 | hM37-H6L2v12 | HC: G97A | 2.5 | 2.0 | 1.8 | 1.1 | NT |
| Ab1020 | hM37-H6L2v13 | HC: N35H | 9.1 | 17.0 | NT | NT | 68 |
| Ab1021 | hM37-H6L2v14 | HC: A40S | 3.1 | 2.3 | NT | NT | NT |
| Ab1022 | hM37-H6L2v15 | HC: A40H | 2.8 | 2.2 | NT | NT | 69.6 |
| Ab1023 | hM37-H6L2v16 | HC: S52cY | 2.0 | 0.9 | NT | NT | NT |
| Ab1024 | hM37-H6L2v17 | HC: A60V | 2.3 | 2.0 | 1.6 | 0.94 | 73.2 |
| Ab1025 | hM37-H6L2v18 | HC: S102Y | 2.2 | 2.5 | NT | NT | NT |
| Ab1026 | hM37-H6L2v19 | LC: W91A | 1.7 | 1.4 | 0.93 | 0.95 | 69.1 |
| Ab1027 | hM37-H6L2v20 | LC: W91F | 9.1 | 10.0 | NT | NT | NT |
| Ab1028 | hM37-H6L2v21 | LC: W91H | 8.8 | 6.7 | NT | NT | NT |
| Ab1029 | hM37-H6L2v22 | LC: W91Y | 7.1 | 4.1 | NT | NT | NT |
| Ab1030 | hM37-H6L2v23 | LC: A43S | 3.3 | 3.1 | NT | NT | NT |
| Ab1031 | hM37-H6L2v24 | LC: S76Q | 2.8 | 2.2 | NT | NT | NT |
| Ab1065 | hM37-H6L2v25 | HC: D96E + | NT | NT | poor fit | poor fit | 72.3 |
| | | LC: W91A | | | | | |
| Ab1066 | hM37-H6L2v26 | HC: G97A + | NT | NT | 5.7 | 3 | 70.4 |
| | | LC: W91A | | | | | |

[0462] In R2 of engineering, combinations of mutations were generated based on improved variants from R1. The affinities to Ag0065 and Ag0066 were measured by SPR and thermostability was measured by DSF as shown in Table 27 below.

TABLE 27

| | | | huEpCAM ECD | cyEpCAM ECD | |
|---|---|---|---|---|---|
| | | | Ag0065 KD (nM) 5- | Ag0066 KD (nM) | |
| | | | pt multi-cycle | 5-pt multi-cycle | TM |
| Ab | Clone | Mutation | kinetics | kinetics | (° C.) |
| Ab1069 | hM37-H6L2 | Parent for this set | 3.6 | 1.4 | 72.0 |
| Ab1088 | hM37-H6L2v12 | HC: G97A | 2.7 | 1.1 | 70.1 |
| Ab1089 | hM37-H6L2v28 | HC: A60V + G97A | 2.2 | 1.2 | 71 |
| Ab1090 | hM37-H6L2v29 | HC: A60V + | 2.1 | 1.2 | 75.7 |
| | | LC: W91A | | | |

### Specificity of the M37 Clone in TDCC Assays

[0463] The M37 clone was expressed as a conventional T cell engager (TCE) with anti-CD3 and anti-EpCAM binding domains on the same heterodimeric Fc domain (Ab682). A historical anti-EpCAM clone, MOC31, was used as a benchmark and cloned into another TCE (Ab619). This TCE format was used to assess the potency, specificity and species reactivity of M37 for in a T cell mediated cellular cytotoxicity (TDCC) co-culture assay (FIG. 33). Four different target cell lines were used for the assay. HCT-116, a human colorectal cancer cell line, endogenously expresses high levels of EpCAM (Casaletto et al 2019; doi: 10.1073/pnas. 1819085116). Chinese hamster ovary (CHO-K1) cells do not express EpCAM and the wild-type (WT) cells were used as a negative control (CHO-K1 WT). Two CHO-derived cell lines were transduced with expression vectors driving the expression of either human EpCAM (CHO-huEpCAM) or cynomolgus macaque EpCAM (CHO-cyEpCAM). The MOC31 clone induced TDCC of HCT-116, CHO-huEpCAM and CHO-cyEpCAM target cells, but not CHO-K1 WT. The M37 clone induced TDCC of huEpCAM and CHO-cyEpCAM target cells, but not CHO-K1 WT (HCT-116 was not tested with this clone in this experiment). Altogether, this data demonstrates that human or cynomolgus macaque EpCAM expression is required for target cell killing with MOC31 or M37.

### EpCAM Expression is Required for Binding of the M37 Clone as Measured by Flow Cytometry

[0464] Surface binding was measured on an isogenic panel of EpCAM-knockout and EpCAM-overexpressing cell lines derived from A-431, a human epidermoid carcinoma cell line (FIG. 34). AEKO and AEPO are isogenic control cell lines in which there is zero EpCAM expression (AEKO) or high EpCAM expression (AEKO-E4). AEKO is a commercially available subclone of A-431 in which human EpCAM expression is “knocked out” (disrupted) by a frameshift mutation (catalog number ab261902; Abcam, Cambridge, UK). AEPO was developed using the AEKO cell line as a starting point and restoring expression of human EpCAM by transducing with a lentiviral vector containing human EpCAM downstream of an EF1α promoter. Cells were stained with Ab1070, a conventional TCE containing the M37-H6L2 variant of the M37 clone, at a range of concentrations from 0.015 nM-1 μM. Surface binding was observed on the AEKO-E4 cells but not the AEKO cells, therefore demonstrating that EpCAM expression is both necessary and sufficient for binding of the M37 clone to target cells.

### EpCAM Expression is Required for TDCC Mediated by the M37 Clone

[0465] The HCT-116, AEKO and AEPO cell lines described above were used as target cells in a TDCC co-culture assay with Ab1070 (FIG. 35). Only the HCT-116 and AEPO cell lines, which express EpCAM, were killed by TDCC or induced activation of T-cells (as measured by CD69 upregulation). The AEKO cell line, which lacks EpCAM, was spared from TDCC and did not induce T-cell activation. Taken together, this data indicates that EpCAM expression on a target cell is both necessary and sufficient to activate T-cells and redirect them to kill the target cell. EpCAM structure-activity relationship (SAR) campaign

[0466] A panel of antibodies, including the 19 molecules depicted in (FIG. 36), was expressed and used to assess the effect of antibody format and geometry on the potency and switchable activity of EpCAM T-LITEs. Permutations explored in this panel of antibody formats included swapping whether the CC or CT antibody contained the LS2A or LS2B components of the LITE Switch. The panel also screened a range of valencies including 1+1 (CD3×EpCAM), 2+1 (CD3×EpCAM+EpCAM), and 2+2 (CD3+CD3×EpCAM+EpCAM) formats. The panel of antibodies was assessed in a series of TDCC experiments using MCF-7 target cells in a co-culture assay (FIG. 37). From this series of experiments, a pair of antibodies (Ab0439 and Ab0649) emerged with preferred combination of properties: Potent TDCC (146 pM EC50) of target cells in the presence of indinavir, no detectable TDCC in the absence of indinavir, and switchable TDCC requiring nanomolar concentrations of indinavir (2 nM EC50). This pair was a 2+1 format in which the first half of the T-LITE (the CC T-LITE) contained an anti-EpCAM Fab and an anti-indinavir scFv (LS2A), and the second half of the T-LITE (the CT T-LITE) contained an anti-CD3 scFv and two copies of the LS2B clone in a tandem Fab configuration. Example antibodies in this preferred format, Ab1059 and 1060, were well expressed (75 mg/L and 102 mg/L respectively), showed monodisperse peaks by UHPLC-SEC, and showed expected MW by SDS-PAGE and mass spectrometry (FIG. 43). Antibodies with this preferred format were explored in mice to determine their pharmacokinetic properties. Ab1059, Ab0160, Ab1070, Ab0189, and Ab1091 exhibited long half-lives (within 3-fold of the Herceptin control Ab0654) consistent with their format as IgG1 Fc domain containing antibodies (FIG. 44). The pharmacokinetic properties of Ab1060 were further assessed in cynomolgus macaques and exhibited a plasma half-life of 4-6 days (FIG. 45). Binding of Ab1060 to T-cells in the peripheral blood of cynomolgous macaques at various time points after dosing was confirmed by flow cytometry (FIG. 46).

### The Format of EpCAM T-LITEs Affects Indinavir-Dependent Killing

[0467] Further iterations of the 2+1 format were explored using later versions of the anti-CD3, anti-EpCAM, LS2A and LS2B clones, and these were tested in a TDCC co-culture assay with HCT-116 target cells. Two exemplary pairs (Ab1093+Ab1091 and Ab1094+Ab1060) were developed which exhibited potent TDCC (<100 pM EC50) in the presence of indinavir, no TDCC in the absence of indinavir, and switchable TDCC when indinavir was titrated (0.3-0.5 nM EC50) (FIG. 38). Notably, a significant amount of indinavir-independent killing was observed when the antibody clones in the CC T-LITE were swapped to the other heterodimeric Fc heavy chain (e.g. Ab1059 instead of Ab1093; Ab1089 instead of Ab1094), despite being paired with the same CT T-LITE antibodies (FIG. 39). Taken together the data supports that the αTTABD domain of the CT and the αCD3 domain of the CC need to either both be on the Fc polypeptide chain containing the “knob” point mutation, or both be on the chain containing the “hole” mutation of their respective heterodimers. This mismatch helps to prevent spontaneous formation of active conventional TCE when CC and CT are mixed in the absence of small molecule, in this case indinavir. This format enables the most switchable activity with the largest off/on dynamic range.

### Cytokine Production by EpCAM T-LITEs in Co-Culture Assays

[0468] A bead-based multiplexed cytokine quantification system (LegendPlex) was used to measure the amount of cytokines released into the growth media by T-cells during TDCC co-culture assays. The supernatants in this experiment were taken from the same experiment as (FIG. 38). In a conventional TCE format, the M37 and hSP34 clones induced high levels of IL-2, IL-10, interferon (IFN) gamma, and TNF alpha (FIG. 40 and FIG. 41). The T-LITE pairs containing these same clones produced much lower levels of cytokines, even at doses that were sufficient to drive TDCC. Interestingly, the levels of cytokines varied depending on the chosen pair of CT and CC domains. Taken together, these data demonstrate that T-LITEs drive less cytokine production than conventional TCEs and the degree of cytokine production is decoupled from the degree of killing.

### Antigen Density Sensing by EpCAM T-LITEs in Co-Culture Assays

[0469] The engineered ability of a therapeutic modality to preferentially target high-expressing target cells while sparing low-expressing cells has been termed “antigen density sensing” in the literature and is a desirable property in some scenarios, especially cancer targets that are expressed at low levels on normal tissues (Choe et al., Ann Rev Cancer Biol 2020; doi: 10.1146/annurev-cancerbio-030419-033657). An exemplary T-LITE pair (Ab1060+Ab1093) and a control TCE with the same anti-EpCAM and anti-CD3 clones (Ab1070) were tested in a TDCC co-culture assay to explore how in vitro potency relates to antigen density on the surface of target cells (FIG. 48). The Ab1070 potently killed both target cell lines, with a window of 47-fold between the EC50 for the high- and low-expressing lines. The T-LITE exhibited dose-dependent killing of the CEPO-HB2 line (EC50: 98.36 pM). Notably, the T-LITE did not kill the CEPO-L2A2 line, even at the highest dose tested (10 nM). Overall, this data demonstrates that activated T-LITEs exhibit antigen density sensing capabilities, and preferentially kill high-expressing target cells.

### Tolerability of a CD3 T-LITE in Transgenic B-hCD3e Mice

[0470] Transgenic mice expressing the extracellular domain of the human CD3E gene were used to assess the tolerability of a CD3 T-LITE incorporating the SP34v68-5 clone and LS2B Fab R5M2 (Ab1060) (FIG. 47). A separate group of mice was injected with a surrogate conventional TCE incorporating the anti-mouse the SP34v68-5 clone and the anti-mouse EpCAM clone G8.8 (Ab1062) as a positive control for T-cell activation. This positive control was expected to be poorly tolerated because it has been previously shown that repeated administration of a surrogate EpCAM TCE incorporating clone G8.8 was toxic in mice (Amann et al., J Immunother. 2009; doi: 10.1097/CJI.0b013e3181a1c097). After a single dose of Ab1062 (1 mg/kg), mice exhibited an average of 10% body weight loss by day 3 post-injection, whereas a single dose of Ab1060 (10 mg/kg) was well tolerated with no evidence of body weight loss within 5 days post-injection. The body weight loss associated with Ab1062 was correlated with a spike in cytokine release into the peripheral blood, as measured by a multiplexed cytokine assay. IFNg, IL-2, IL-6 and TNFa were all elevated by 6 hours post-injection in mice treated with Ab1062, whereas cytokine levels following Ab1060 injection either showed smaller changes or were unchanged, depending on the cytokine. Overall, this data demonstrates that the CD3 T-LITE Ab1060 did not cause widespread T cell activation in vivo in transgenic B-hCD3e mice and it was well tolerated as reflected by the lack of any overt clinical symptoms and the maintenance of body weight.

Blocking Indinavir Binding by LS2A with a Quencher Prevents Killing of Target Cells

[0471] The kinetics of TDCC in a co-culture assay were measured using time-lapse microscopy (FIG. 42). The HCT-116-NR target cells exhibited unchecked growth in wells with the vehicle or T-LITEs in the absence of indinavir (“Always OFF”), consistent with the observation in other assays that T-LITEs require indinavir to induce T-cell activation. When indinavir was added at the earliest time point of T=0 min (“Always ON”), the plate was depleted of target cells, in a similar fashion as the conventional TCE (Ab1007), therefore demonstrating that the addition of indinavir can activate the T-LITE. To test how T-LITE-activated T-cells respond to the removal of indinavir, an “anti-indinavir quencher” was used. The anti-indinavir clone in the quencher is distinct from LS2A but binds to indinavir with a higher affinity than LS2A does, and it competes for the same binding epitope. Therefore, when the quencher is added in molar excess of LS2A (in this experiment, 5 μM quencher vs. 10 nM LS2A), it sequesters free indinavir and prevents its incorporation into new T-LITE complexes (“ON→OFF”). When the T-LITE was turned OFF at 30 min, nearly all TDCC was blocked, with the curve resembling the “Always OFF” condition. As the T-LITE was turned off at later time points, the tumor growth curves more closely resembled the “Always ON” condition. Taken together, these results demonstrate that the TDCC mediated by T-LITEs is switchable (it requires indinavir) and reversible (it can be disrupted by removing available indinavir from the system).

### Methods

### Vector Generation for Antibody Expression:

[0472] Plasmids for antibody expression were constructed by standard molecular biology methods. All DNA fragments were synthesized by IDT Technologies or Twist Biosciences and subcloned into either the pFUSE vector (InvivoGen) or pcDNA3.4 vector (Thermo Scientific) with Gibson assembly.

### Antibody Expression and Purification (FIG. 43):

[0473] All antibodies were expressed and purified from Expi293F (Thermo Fisher Scientific) or modified Expi293 BirA-KDEL (PMID: 29359686) cells according to an established protocol from the manufacturer (Thermo Fisher Scientific). Briefly, pFUSE (InvivoGen) vector encoding the protein of interest was transiently transfected into Expi293F cells at a fixed density of 3M/mL using the Expifectamine transfection kit and manufacturer's protocol (Thermo Fisher Scientific). Expression volumes varied, but a fixed vector:transfection reagent ratio (1 mg:2.8 ml) was used. For multi-chain proteins, a stoichiometric equivalent of each respective vector was used. Culturing media for BirA cells was additionally supplemented with 100 μM of biotin prior to transfection for in vivo biotinylation. Enhancing supplements from the Expifectamine kit were added 20 hours post-transfection. Cells were incubated for a total of 4 d at 37° C. in an 8% CO₂ environment with orbital shaking before the supernatants were harvested by centrifugation. Fc-fusion proteins were purified by Protein A (MabSelect PrismA) affinity chromatography and His-tagged proteins were purified by Ni-NTA (Roche cOmplete™ His-Tag Resin) affinity chromatography. Eluted proteins from affinity purification were further separated by Size-exclusion chromatography with a Superdex 200 increase 10/300 GL column (Cytiva) in storage buffer (1×HBS+5% Glycerol) as an aqueous phase. Samples were injected manually and fractionated via an AKTA Pure System with Software UNICORN 7.3 (Cytiva). Purity and integrity were assessed by SDS-PAGE with 4-12% BIS-TRIS precast gels (Thermo Fisher Scientific). Samples were stored at either 4° C. or −80° C. with storage buffer in aliquots.

### Differential Scanning Fluorimetry (DSF) (FIG. 19):

[0474] DSF was performed on a LC480 Lightcycler Instrument II (Roche). Purified recombinant protein was diluted to 5 μM in DSF buffer (PBS, pH 7.4, Sypro Orange 5×) with small molecule (10 μM VTX) or vehicle (0.05% DMSO) and then heated with a temperature gradient (0.01° C./s) from 25 to 95° C. Data were continuously acquired at ˜465 nm (excitation) and ˜580 nm (emission). Data was analyzed to generate first derivative curves in which the curve maximum was reported as the melting temperature of the protein.

### Ultrahigh Pressure Liquid Chromatography—Size Exclusion Chromatography (UPLC-SEC) (FIG. 15, FIG. 16, FIG. 18, FIG. 43):

[0475] UPLC-SEC was performed on a Thermo Scientific Vanquish Flex UHPLC system. Protein was diluted to 1-5 μM in HBS buffer and then 1.5-10 μL of sample was injected onto a MabPAC 4.6×150 mm in 1×PBS-HCl at pH 7.0. Data were continuously acquired at ˜280 nm and processed on the Chromeleon 7 software (Thermo Scientific). For the low pH hold assay, prior to injection on the UHPLC, samples were held at pH 3.5 for 1 hour followed by neutralization. For the complex assembly assay, the MabPAC 4.6×150 mm column was pre-equilibrated with 1×PBS-HCl at pH 7.0 and 10 μM Indinavir.

### Mass Spectrometry (FIG. 43):

[0476] Sample was denatured with or without reducing by guanidine and DTT and then deglycosylated by PNGaseF (MEDNA Bio E1041). The sample was analyzed by Waters ACQUITY UPLC coupled to XevoG2-XS QTOF mass spectrometer using an ACQUITY UPLC Protein BEH SEC column.

### Binding Kinetics Analysis (FIG. 17 and FIG. 23):

[0477] Bio-layer interferometry (BLI) data were measured using an Octet RED384 (ForteBio) instrument. Antigens of interest were immobilized on an AHC biosensor and loaded until a 0.4-0.6-nm signal was achieved. Purified antibodies were used as the analyte premixed with 10 μM Indinavir or 0.05% DMSO vehicle. PBSTB (PBS, pH 7.4, 0.05% Tween-20, 0.2% BSA) was used for all buffers for BLI. Data were analyzed using ForteBio Octet analysis software and kinetic parameters were determined using a 1:1 monovalent binding model.

[0478] Supertant titer quantitation on SP34 clones (FIG. 28) was performed accordingly. Briefly, supernatents from 24-well plates were harvested, centrifuged at 4100 g for 20 minutes to pellet expression cells, and clarified supernatents were transferred to an Octet 96-well plate. AHQ biosensors were used with standard manufactures protocol for sample quantitation to measure antibody concentrations. Sample concentrations were extrapolated from a standard curve generated with an IgG reference molecule diluted in Expi293F media. For detection of CD3E binding in supernatents, biotinylated CDE antigen CD3E ECD (AcroBio) was immobilized on a streptavidin biosensor and loaded until ˜1 nm signal was achieved. Biosensors were then dipped in clarified cell supernatant to detect binding.

[0479] LITE Switch indinivir (IDV) washout/reversibility kinetics (FIG. 21) were measured by biolayer interferometry (BLI) on an Octet® Qke (Sartorius) instrument. Biotinylated scFv-Fc Ag67, in the presence of 1 μM IDV or 0.05% DMSO vehicle, was immobilized on streptavidin biosensors and loaded to a signal of 1.2-1.8 nm. After loading, biosensors were blocked with 10 μM biotin containing 1 μM IDV or vehicle. Association steps were performed for 10 minutes in the presence of 50 nM Ab1073 Fabs and 1 μM IDV or vehicle. At steady-state binding of Ab1073 to Ag67, LITE Switch complexes dissociated for 2 hours in buffer containing (1) 50 nM Ab1073 and 1 μM IDV, (2) 50 nM Ab1073 and vehicle (3) vehicle only. Data were analyzed using ForteBio Data Analysis HT software version 12.0.2.59. Dissociation constants were determined using a 1:1 monovalent binding model, local fitting, and with dissociation baseline to zero. Data were additionally analyzed using GraphPad Prism 9 software version 9.1.2 (225) with a one-phase exponential decay nonlinear regression model. Parameters included NS (binding at infinite times) set to zero and K (inverse rate constant)>0.

### Biacore (FIG. 20):

[0480] The affinities of anti-EpCAM antibodies to human or cyno EpCAM ECD were measured by surface plasmon resonance (SPR) with a Biacore T200. All assays were performed at 25° C. in 1×HBS-EP+ buffer made from a 10× buffer stock (Cytiva BR100669). Anti-EpCAM antibodies were captured on a Series S Sensor Chip CM5 (Cytiva 29149603) using the Human Antibody Capture Kit (Cytiva BR100839). For single-cycle kinetics experiments, five sequential injections of 3-fold serial diluted (1.23, 3.70, 11.1, 33.3, 100 nM) human (Ag0065) or cyno (Ag0066) EpCAM ECD antigen at 30 μL/min for 180 seconds each was performed, and dissociation was monitored for 600 seconds. The data was double referenced subtracted to the reference lane and five sequential injections of 0 nM antigen. For multi-cycle kinetics experiments, 0 nM antigen was injected for 300 seconds at 30 L/min followed by a dissociation step for 600 seconds. Five additional cycles were performed with increasing antigen concentrations of 1.23, 3.70, 11.1, 33.3, and 100 nM. The data was double referenced subtracted to the reference lane and the 0 nM sensogram. The sensor chip was regenerated with an injection of 3 M magnesium chloride for 45 seconds at 30 μL/min after each cycle. Single-cycle and multi-cycle data was fit to a 1:1 Langmuir model to determine the association and dissociation rate constants.

[0481] The affinities of anti-CD3e antibodies to monovalent human CD3e N-terminal peptide AA1-26 fused to a murine Fc domain (Ag0060) were measured by surface plasmon resonance (SPR) with a Biacore T200. All assays were performed at 25° C. in 1×HBS-EP+ buffer made from a 10× buffer stock (Cytiva BR100669). Anti-CD3e antibodies were captured on a Series S Sensor Chip CM5 (Cytiva 29149603) using the Human Antibody Capture Kit (Cytiva BR100839). For single-cycle kinetics experiments, five sequential injections of 3-fold serial diluted (3.70, 11.1, 33.3, 100, 300 nM) Ag0060 at 30 μL/min for 120 seconds each was performed, and dissociation was monitored for 420 seconds. For weakened affinity variants, the single-cycle experiment was modified to have five sequential injections of 3-fold serial diluted (24.7, 74.1, 222, 667, 2000 nM) Ag0060 at 30 L/min for 180 seconds each and dissociation was monitored for 600 seconds. The data was double referenced subtracted to the reference lane and five sequential injections of 0 nM antigen. The sensor chip was regenerated with an injection of 3 M magnesium chloride for 45 seconds at 30 μL/min after each cycle. The kinetic data was fit to a 1:1 Langmuir model to determine the association and dissociation rate constants.

[0482] The affinities of LS2A clones R2M34 (Ab0759) and R3M1 (Ab0899) to free indinavir were measured by surface plasmon resonance (SPR) with a Biacore T200. All assays were performed at 25° C. in 1×PBS-P+ buffer made from a 10× buffer stock (Cytiva 28995084). Ab0759 and Ab0899 were amine coupled to a Series S Sensor Chip CM5 (Cytiva 29149603). Trastuzumab, a non-binding control, was amine coupled to the reference lane. For Ab0759, a single-cycle kinetics experiment was performed with five sequential injections of 3-fold serial diluted (37, 111, 333, 1000, 3000 nM) indinavir at 30 μL/min for 240 seconds each and dissociation was monitored for 600 seconds. For Ab0899, a single-cycle kinetics experiment was performed with five sequential injections of 3-fold serial diluted (12.3, 37, 111, 333, 1000 nM) indinavir at 30 L/min for 240 seconds each and dissociation was monitored for 600 seconds. The data was double referenced subtracted to the reference lane and five sequential injections of 0 nM indinavir. The kinetic data was fit to a 1:1 Langmuir model to determine the association and dissociation rate constants.

### Measurement of Ab0640 Pharmacokinetics in Mice (FIG. 31):

[0483] Female C56BL/6 mice (age 10-12 weeks) were distributed into 2 groups (n=5 per group). Antibodies were diluted in sterile PBS and injected intravenously at 6.7 mg/kg. Blood (55 μL from the retroorbital sinus) was sampled serially at 4 time points (30 min, 1 day, 3 days, 7 days), processed to plasma, diluted 1:10 in 50% glycerol+PBS, then cryopreserved. Plasma concentrations were quantified using an anti-human IgG sandwich ELISA that was developed and qualified in-house. The capture antibody for the ELISA was goat anti-human IgG (Cat. No. 2049-01; Southern Biotech, Birmingham, AL) coated on 96-well Nunc-Immuno Maxisorp plates (Thermo Fisher Scientific) at 1 pg/mL for 1 hr at 37° C. The detection antibody was mouse anti-human IgG Fc-HRP (Cat. No. 9042-05; Southern Biotech, Birmingham, AL) at 1:32,000 dilution of the manufacturer stock. ELISA coating, blocking, wash, and TMB substrate buffers from BioLegend were used according to the manufacturer's instructions. Non-compartmental pharmacokinetic parameters were calculated using the PKNCA package for R (doi: 10.1007/s10928-015-9432-2).

### Measurement of Ab1059, Ab1060, Ab1070, Ab1089, and Ab1091 Pharmacokinetics in Mice (FIG. 44)

[0484] Female C56BL/6 mice (age 11-12 weeks) were distributed to 6 groups (n=5 per group). Antibodies were diluted in sterile PBS and injected intravenously at the molar equivalent of 10 mg/kg IgG (adjusted for the actual molecular weight of the antibody, and assuming a 150 kDa molecular weight for a typical IgG). Blood (25 μL from the tail vein) was sampled serially at 7 time points (15 min, 1 hr, 6 hr, 24 hr, 72 hr, 6 days, 10 days), processed to plasma, diluted 1:10 in 50% glycerol+PBS, then cryopreserved. Plasma concentrations were quantified using an anti-human IgG sandwich ELISA that was developed and qualified in-house as described above. Two-compartment pharmacokinetic parameters were calculated using the Phoenix WinNonLin software package (Certara, Princeton, NJ).

### Isolation of T Cells for In Vitro Assays (FIG. 24, FIG. 25, FIG. 26, FIG. 27, FIG. 30, FIG. 33, FIG. 35, FIG. 37, FIG. 38, FIG. 39, FIG. 40, FIG. 41, FIG. 42, FIG. 48)

[0485] Leukapheresis packs were obtained from deidentified healthy adult donors (StemCell Technologies, Vancouver, BC). Peripheral blood mononuclear cells (PBMCs) were first isolated using the EasySep Direct Human PBMC Kit (StemCell Technologies). Human T cells were magnetically isolated from the PBMCs using the EasySep Human T cell Isolation Kit (StemCell Technologies). T cells were cryopreserved in DMEM with 10% FBS and 10% DMSO and thawed the day of experiments.

### In Vitro Measurement of T-Cell Activation and TDCC (FIG. 24, FIG. 25, FIG. 26, FIG. 27, FIG. 30, FIG. 33, FIG. 35, FIG. 37, FIG. 38, FIG. 39, FIG. 40, FIG. 41, FIG. 48)

[0486] Co-culture assays were used to assess T-cell activation (CD69 upregulation), cytokine production or T-cell-dependent cellular cytotoxicity (TDCC) of target cells. Flat-bottom 96-well plates were seeded with 5,000 target cells in complete growth media (DMEM+10% FBS+1% penicillin/streptomycin) 16-24 hrs before the assay. Antibody drugs were added in 10 μL growth media and incubated for at least 10 min at 37° C. Indinavir or vehicle control was added in 10 μL growth media. Magnetically isolated human T-cells were thawed, washed, and resuspended in complete growth media, then added to target cells (50,000 T cells per well) in 80 μL growth media for a final assay well volume of 100 μL. The final effector:target (E:T) ratio was 10:1. Assay plates were incubated at 37° C. with 5% CO₂ for 66-70 hr depending on the experiment. T-cells were transferred to a U-bottom 384-well plate and spun (600 rcf×5 min). Supernatants were stored at −20° C. for later analysis of cytokines. T-cells were resuspended in CF405M viability dye (0.5 μM, Biotium, Fremont, CA) in PBS for 10 min at 37° C. At the end of viability staining, cells were fixed by adding methanol-free paraformaldehyde (Electron Microscopy Sciences, Hatfield, PA) to a final concentration of 1% for 10 min at room temperature. T-cells were spun (600 rcf×5 min) and supernatant was aspirated. T-cells were stained with FITC-conjugated anti-human CD45 (BioLegend, San Diego, CA) at 1 pg/mL final dilution and PE-conjugated anti-human CD69 (BioLegend, San Diego, CA) at 400 ng/mL final dilution for 30 minutes at room temperature in the dark, then immediately run an IntelliCyt® iQue3 flow cytometer (Sartorius AG, Göttingen, Germany). While T cells were being processed, target cells were incubated with CellTiter-Glo 2.0 (Promega, Madison, WI) for 15 min at room temperature with shaking then read for luciferase light emission on a GloMax Explorer plate reader using default settings. Specific Cytotoxicity (%) was calculated from the relative luminescence unit values (RLU) using the formula: [1−(experimental RLU/vehicle-treated RLU))×100]. The frequency of CD69+ T-cells (%) was calculated as the percentage of CD69-positive events within the CF405M-negative population. Dose-response curves and EC₅₀ values were calculated in GraphPad Prism 9 software (GraphPad Software San Diego, CA).

### Cytokine Measurement (FIG. 40 and FIG. 41)

[0487] At the conclusion of TDCC co-culture assays, the T-cells were separated from the target cells, centrifuged, and the growth media was transferred to a storage plate to be frozen at −20° C. until later analysis. Cytokine production was measured using the LEGENDplex™ Human Th1 Panel (5-plex) (BioLegend, San Diego, CA) according to the manufacturer's instructions and data acquisition on the iQue3 cytometer.

### Surface Staining of Human and Cyno PBMCs (FIG. 32):

[0488] Peripheral blood mononuclear cells (PBMCs) from healthy cynomolgus macaques (Chinese origin) were obtained commercially (iQ Biosciences, Berkeley, CA). Peripheral blood mononuclear cells (PBMCs) from healthy human donors were isolated from leukapheresis packs (leukopaks) from deidentified healthy adult donors (StemCell Technologies, Vancouver, BC). Human PBMCs were isolated using the EasySep Direct Human PBMC Kit (StemCell Technologies) then cryopreserved in DMEM with 10% FBS and 10% DMSO. Frozen PBMC cryovials were thawed on the day of experiments and washed complete growth media (DMEM+10% FBS+1% penicillin/streptomycin). Cells were resuspended in growth media and transferred to a 96-well U-bottom plate at 55,000 cell/well. Human TruStain FcX (Fc Receptor Blocking Solution; Catalog number 422302; BioLegend, San Diego, CA) was added at a 1:20 final dilution of the manufacturer's stock and incubated for 10 minutes at room temperature in a volume of 25 μL. Experimental antibodies diluted in CSM were added to the cells and incubated for 30 minutes at room temperature, in a total volume of 100 μL. Triplicate wells were prepared for each staining concentration. Plates were washed by adding 160 μL CSM, spinning 600 rcf×5 minutes and aspirating supernatant. The wash was repeated. Fluorescent conjugated antibodies (Brilliant Violet 650 anti-CD8 clone RPA-T8; PE conjugated anti-human IgG clone M1310G05; PE-Cγ7 anti-CD4 clone L200; Alexa 647 anti-TCRalpha/beta clone R73 or clone IP26) were obtained commercially from BioLegend (San Diego, CA) or BD Bioscience (San Jose, CA) and added at the manufacturer's recommended concentrations in a final volume of 100 μL then stained for 30 minutes at room temperature. Two washes were performed as above. Cells were resuspended in 60 μL DAPI Staining Solution (Catalog number GTX16206; GeneTex, Hsinchu City 300, Taiwan, China) at a final concentration of 1:10 of the manufacturer's stock solution. Cells were run immediately on an IntelliCyt® iQue3 flow cytometer (Sartorius AG, Göttingen, Germany).

### Surface Staining of Tumor Cell Lines (FIG. 34):

[0489] A single-cell suspension of adherent tumor cell lines was obtained by incubating 5 minutes with TrypLE Express (Gibco, Waltham, MA) and quenching with growth media (DMEM+10% FBS+1% penicillin/streptomycin), centrifuging at 400 rcf×5 minutes, aspirating the supernatant, and resuspending the cell pellet in CSM (AutoMACS Running Buffer, Miltenyi Biotec, Bergisch Gladbach, Germany).

[0490] Single-cell suspensions were transferred to a 96-well U-bottom plate at 30,000 cell/well and incubated with experimental antibodies diluted in CSM for 30 minutes at room temperature, in a total volume of 40 μL. Triplicate wells were prepared for each staining concentration. Plates were washed by adding 160 μL CSM, spinning 600 rcf×5 minutes and aspirating supernatant. The wash was repeated. Secondary antibody (PE conjugated anti-human Fc, catalog number 410708, BioLegend, San Diego, CA) was added at a final concentration of 5 pg/mL in a final volume of 30 μL and stained for 30 minutes at room temperature. Two washes were performed as above. Cells were resuspended in 60 μL DAPI Staining Solution (Catalog number GTX16206; GeneTex, Hsinchu City 300, Taiwan, China) at a final concentration of 1:10 of the manufacturer's stock solution. Cells were run immediately on an IntelliCyt® iQue3 flow cytometer (Sartorius AG, Göttingen, Germany).

### Real-Time Measurement of TDCC by Time-Lapse Microscopy (FIG. 42):

[0491] Co-cultures of magnetically isolated human T-cells and target cells were prepared as described above for TDCC assays, with some modifications. The target cells were HCT-116-NR cells, which are HCT-116 cells that were stably transduced with a nuclear-localized NucLight Red fluorophore (Sartorius AG, Göttingen, Germany). Co-cultures with appropriately diluted drugs were set up in flat-bottom 96-well plates in 150 μL final volume. Plates were imaged on an IncuCyte® S3 live-cell analysis system (Sartorius AG, Göttingen, Germany) once per hour starting when indinavir was added. Some wells were treated with a “quencher”, an IgG containing an anti-indinavir clone that blocks binding by LS2A but does not bind to LS2B. The IncuCyte software was used to quantify Normalized target cell abundance (red object area per image, normalized to T=0 h).

### Measurement of Ab1060 Pharmacokinetics in Cynomolgus Macaques (FIG. 45)

[0492] Two male and two female cynomolgus macaques (Mauritius origin) were distributed to 4 groups (n=1 per group). Animals were fasted overnight prior to dosing. Antibodies were dosed in alert animals at Time=0 hr via intravenous infusion using an infusion pump over 15 minutes. A postdose flush of saline was administered at a volume of approximately 1 mL. Blood (400 μL) was sampled serially at 13 time points post-infusion (1 hr, 3 hr, 6 hr, 1 d, 2 d, 3 d, 4 d, 5 d, 6 d, 7 d, 8 d, 9 d, and 10 d) with potassium EDTA as the anticoagulant, then processed to plasma and frozen. Plasma concentrations were quantified using an anti-human IgG sandwich ELISA that was developed and qualified in-house as described above. Pharmacokinetic parameters were calculated using the Phoenix WinNonLin software package (Certara, Princeton, NJ).

### Measurement of Ab1060 Cell Surface Binding in Cynomolgus Macaques (FIG. 46)

[0493] Two male and two female cynomolgus macaques (Mauritius origin) were distributed to 4 groups (n=1 per group). Animals were fasted overnight prior to dosing. Antibodies were dosed in alert animals at Time=0 hr via intravenous infusion using an infusion pump over 15 minutes. A postdose flush of saline was administered at a volume of approximately 1 mL. Blood (200 μL) was sampled serially at 8 time points post-infusion (1, 24, 48, 72, 96, 168, 192 and 240 hr) with potassium EDTA as the anticoagulant, then washed by centrifugation, and blocked with TruStain FcX (BioLegend, San Diego, CA) prior to antibody staining. Cells were stained for 30 minutes at room temperature with a panel of fluorescent conjugated antibodies (Brilliant Violet 650 anti-CD8 [BioLegend clone RPA-T8]; Brilliant Violet 605 anti-CD4 [BD Biosciences clone L200], AlexaFluor 700 anti-CD3 [BD Biosciences clone SP34-2], PE anti-human IgG Fc [BioLegend clone M1310G05]) in Brilliant Stain Buffer Plus (BD Biosciences, San Jose, CA). After staining, erythrocytes were lysed by adding ACK Lysis Solution, repeating lysis, and washing. Cells were run on a FACSAria Fusion Flow Cytometer (BD Biosciences). Data was analyzed with the FlowJo software package (BD Bioscience). CD4+ T cells were identified by gating on CD3+CD4+CD8-events. Median fluorescence intensity (MFI) of the PE channel in each sample was calculated and expressed as a normalized value relative to the sample with the highest MFI.

Measurement of Cytokines in Plasma from Transgenic B-hCD3e Mice (FIG. 47)

[0494] Transgenic B-hCDE mice on the C57BL/6 strain background were obtained from Biocytogen (Wakefield, MA). These mice were homozygous for a knock-in mutation in which exons 2-6 of the mouse Cd3e gene were replaced by exons 2-7 of the human CD3E gene. Mice (n=4 per group, female, age 7-10 weeks) were injected intravenously in the lateral tail vein with the indicated antibodies and doses. Serial blood draws from the tail vein were processed to EDTA plasma, diluted 10-fold with a cryoprotectant buffer (50% glycerol in PBS), then frozen at −80° C. until later analysis. Cytokine levels were measured using the MILLIPLEX® Mouse High Sensitivity T Cell Panel multiplex bead-based assay (MilliporeSigma) using Luminex technology.

### Generation of EpCAM-Expressing Cell Lines (FIG. 33, FIG. 34, FIG. 35 and FIG. 48)

[0495] For some experiments, immortalized cell lines were genetically engineered to express EpCAM. Lentiviral vectors were cloned with the coding region of human EpCAM or cynomolgus macaque EpCAM driven by a mammalian promoter (UBC, SV40, EF1-alpha, MinTK, TATA) and an antibiotic selection marker driven by a separate mammalian promoter. Cells were transduced, selected with the appropriate antibiotic, then expanded under antibiotic selection prior to characterizing surface expression by flow cytometry. Flow cytometry staining was performed with the anti-human EpCAM clone 9C4 conjugated to either PE or FITC fluorophores (BD Biosciences, San Jose, CA). For some cell lines, FACS was used to isolate single-cell clones which were subsequently expanded and characterized by surface staining.

The application's sequence listing, which the Patent Office published only in electronic form, follows.

SEQUENCE LISTING (3937 sequences)

SEQ ID NO: 1 - protein, 474 aa, synthetic construct
  REGION 1..474: note = Ab0188 HC hole
EVQLQQPGAELVKPGASVKLSCKASGYTFTSYWMHWVKQRPGQGLEWIGMIHPNSGGTNYNEKFKSKATLTVDKSSSTAYMQLSSLTSEDSAVYYCAMGDYVSRDYWGQGTTLTVSSGSTKLEEGEFSEASGEIVLTQSPAIMSASPGEKVTMTCRASSSVSSSYLHWYQQKSGASPKLWIYSTSNLASGVPARFSGSGSGTSYSLTISSMEAEDAATYYCQQYSGYLFTFGAGTKLELKAAALESSDKTHTCPPCPAPEAAGGPSVFLFPPKPKDTLMISRTPEVTCVVVDVSHEDPEVKFNWYVDGVEVHNAKTKPREEQYNSTYRVVSVLTVLHQDWLNGKEYKCKVSNKALGAPIEKTISKAKGQPREPQVYTLPPIRELMTSNQVSLSCAVKGFYPSDIAVEWESNGQPENNYKTTPPVLDSDGSFFLVSKLTVDKSRWQQGNVFSCSVMHEALHNHYTQKSLSLSPGK

SEQ ID NO: 2 - protein, 5 aa, synthetic construct
  REGION 1..5: note = Ab0188 CDR H1
SYWMH

SEQ ID NO: 3 - protein, 17 aa, synthetic construct
  REGION 1..17: note = Ab0188 CDR H2
MIHPNSGGTNYNEKFKS

SEQ ID NO: 4 - protein, 8 aa, synthetic construct
  REGION 1..8: note = Ab0188 CDR H3
GDYVSRDY

SEQ ID NO: 5 - protein, 12 aa, synthetic construct
  REGION 1..12: note = Ab0188 CDR L1
RASSSVSSSYLH

SEQ ID NO: 6 - protein, 7 aa, synthetic construct
  REGION 1..7: note = Ab0188 CDR L2
STSNLAS

SEQ ID NO: 7 - protein, 9 aa, synthetic construct
  REGION 1..9: note = Ab0188 CDR L3
QQYSGYLFT

SEQ ID NO: 8 - protein, 472 aa, synthetic construct
  REGION 1..472: note = Ab0220 HC Hole
QVQLVQSGAEVKKPGASVKVSCKASGYTFTSYWMHWVRQAPGQGLEWMGIIHPNSGGTSYAQKFQGRVTMTRDTSTSTVYMELSSLRSEDTAVYYCAMGDYVSRDYWGQGTLVTVSSGGGGSGGGGSGGGGSEIVLTQSPGTLSLSPGERATLSCRASSSVSSSYLHWYQQKPGQAPRLLIYSTSSRATGIPDRFSGSGSGTDFTLTISRLEPEDFAVYYCQQYSGYLFTFGQGTKLEIKGGGGSDKTHTCPPCPAPEAAGGPSVFLFPPKPKDTLMISRTPEVTCVVVDVSHEDPEVKFNWYVDGVEVHNAKTKPREEQYNSTYRVVSVLTVLHQDWLNGKEYKCKVSNKALGAPIEKTISKAKGQPREPQVYTLPPIRELMTSNQVSLSCAVKGFYPSDIAVEWESNGQPENNYKTTPPVLDSDGSFFLVSKLTVDKSRWQQGNVFSCSVMHEALHNHYTQKSLSLSPGK

SEQ ID NO: 9 - protein, 5 aa, synthetic construct
  REGION 1..5: note = Ab0220 CDR H1
SYWMH

SEQ ID NO: 10 - protein, 17 aa, synthetic construct
  REGION 1..17: note = Ab0220 CDR H2
IIHPNSGGTSYAQKFQG

SEQ ID NO: 11 - protein, 8 aa, synthetic construct
  REGION 1..8: note = Ab0220 CDR H3
GDYVSRDY

SEQ ID NO: 12 - protein, 12 aa, synthetic construct
  REGION 1..12: note = Ab0220 CDR L1
RASSSVSSSYLH

SEQ ID NO: 13 - protein, 7 aa, synthetic construct
  REGION 1..7: note = Ab0220 CDR L2
STSSRAT

SEQ ID NO: 14 - protein, 9 aa, synthetic construct
  REGION 1..9: note = Ab0220 CDR L3
QQYSGYLFT

SEQ ID NO: 15 - protein, 215 aa, synthetic construct
  REGION 1..215: note = Ab0368 LC Hole
EIVLTQSPGTLSLSPGERATLSCRASSSVSSSYLHWYQQKPGQAPRLLIYSTSSRATGIPDRFSGSGSGTDFTLTISRLEPEDFAVYYCQQYSGYLFTFGQGTKLEIKRTVAAPSVFIFPPSDSQLKSGTASVVCLLNNFYPREAKVQWKVDNALQSGNSQESVTEQDSKDSTYSLSSTLTLSKADYEKHKVYACEVTHQGLSSPVTKSFNRGEC

SEQ ID NO: 16 - protein, 447 aa, synthetic construct
  REGION 1..447: note = Ab0368 HC Hole
QVQLVQSGAEVKKPGASVKVSCKASGYTFTSYWMHWVRQAPGQGLEWMGIIHPNSGGTSYAQKFQGRVTMTRDTSTSTVYMELSSLRSEDTAVYYCAMGDYVSRDYWGQGTLVTVSSASTKGPSVFPLAPSSKSTSGGTAALGCLVKDYFPEPVTVSWNSGALTSGVHTFPAVLQSSGLYSLSSVVTVPSSSLGTQTYICNVNHKPSNTKVDKKVEPKSCDKTHTCPPCPAPEAAGGPSVFLFPPKPKDTLMISRTPEVTCVVVDVSHEDPEVKFNWYVDGVEVHNAKTKPREEQYNSTYRVVSVLTVLHQDWLNGKEYKCKVSNKALGAPIEKTISKAKGQPREPQVYTLPPIRELMTSNQVSLSCAVKGFYPSDIAVEWESNGQPENNYKTTPPVLDSDGSFFLVSKLTVDKSRWQQGNVFSCSVMHEALHNHYTQKSLSLSPGK

SEQ ID NO: 17 - protein, 5 aa, synthetic construct
  REGION 1..5: note = Ab0368 CDR H1
SYWMH

SEQ ID NO: 18 - protein, 17 aa, synthetic construct
  REGION 1..17: note = Ab0368 CDR H2
IIHPNSGGTSYAQKFQG

SEQ ID NO: 19 - protein, 8 aa, synthetic construct
  REGION 1..8: note = Ab0368 CDR H3
GDYVSRDY

SEQ ID NO: 20 - protein, 12 aa, synthetic construct
  REGION 1..12: note = Ab0368 CDR L1
RASSSVSSSYLH

SEQ ID NO: 21 - protein, 7 aa, synthetic construct
  REGION 1..7: note = Ab0368 CDR L2
STSSRAT

SEQ ID NO: 22 - protein, 9 aa, synthetic construct
  REGION 1..9: note = Ab0368 CDR L3
QQYSGYLFT

SEQ ID NO: 23 - protein, 215 aa, synthetic construct
  REGION 1..215: note = Ab0615 LC hole
EIVLTQSPAIMSASPGEKVTMTCRASSSVSSSYLHWYQQKSGASPKLWIYSTSNLASGVPARFSGSGSGTSYSLTISSMEAEDAATYYCQQYSGYLFTFGAGTKLELKRTVAAPSVFIFPPSDSQLKSGTASVVCLLNNFYPREAKVQWKVDNALQSGNSQESVTEQDSKDSTYSLSSTLTLSKADYEKHKVYACEVTHQGLSSPVTKSFNRGEC

SEQ ID NO: 24 - protein, 447 aa, synthetic construct
  REGION 1..447: note = Ab0615 HC Hole
EVQLQQPGAELVKPGASVKLSCKASGYTFTSYWMHWVKQRPGQGLEWIGMIHPNSGGTNYNEKFKSKATLTVDKSSSTAYMQLSSLTSEDSAVYYCAMGDYVSRDYWGQGTTLTVSSASTKGPSVFPLAPSSKSTSGGTAALGCLVKDYFPEPVTVSWNSGALTSGVHTFPAVLQSSGLYSLSSVVTVPSSSLGTQTYICNVNHKPSNTKVDKKVEPKSCDKTHTCPPCPAPEAAGGPSVFLFPPKPKDTLMISRTPEVTCVVVDVSHEDPEVKFNWYVDGVEVHNAKTKPREEQYNSTYRVVSVLTVLHQDWLNGKEYKCKVSNKALGAPIEKTISKAKGQPREPQVYTLPPIRELMTSNQVSLSCAVKGFYPSDIAVEWESNGQPENNYKTTPPVLDSDGSFFLVSKLTVDKSRWQQGNVFSCSVMHEALHNHYTQKSLSLSPGK

SEQ ID NO: 25 - protein, 5 aa, synthetic construct
  REGION 1..5: note = Ab0615 CDR H1
SYWMH

SEQ ID NO: 26 - protein, 17 aa, synthetic construct
  REGION 1..17: note = Ab0615 CDR H2
MIHPNSGGTNYNEKFKS

SEQ ID NO: 27 - protein, 8 aa, synthetic construct
  REGION 1..8: note = Ab0615 3
GDYVSRDY

SEQ ID NO: 28 - protein, 12 aa, synthetic construct
  REGION 1..12: note = AB0615 CDR L1
RASSSVSSSYLH

SEQ ID NO: 29 - protein, 7 aa, synthetic construct
  REGION 1..7: note = Ab0615 CDR L2
STSNLAS

SEQ ID NO: 30 - protein, 9 aa, synthetic construct
  REGION 1..9: note = Ab0615 CDR L3
QQYSGYLFT

SEQ ID NO: 31 - protein, 472 aa, synthetic construct
  REGION 1..472: note = Ab0616 HC Hole
EIVLTQSPGTLSLSPGERATLSCRASSSVSSSYLHWYQQKPGQAPRLLIYSTSSRATGIPDRFSGSGSGTDFTLTISRLEPEDFAVYYCQQYSGYLFTFGQGTKLEIKGGGGSGGGGSGGGGSQVQLVQSGAEVKKPGASVKVSCKASGYTFTSYWMHWVRQAPGQGLEWMGIIHPNSGGTSYAQKFQGRVTMTRDTSTSTVYMELSSLRSEDTAVYYCAMGDYVSRDYWGQGTLVTVSSGGGGSDKTHTCPPCPAPEAAGGPSVFLFPPKPKDTLMISRTPEVTCVVVDVSHEDPEVKFNWYVDGVEVHNAKTKPREEQYNSTYRVVSVLTVLHQDWLNGKEYKCKVSNKALGAPIEKTISKAKGQPREPQVYTLPPIRELMTSNQVSLSCAVKGFYPSDIAVEWESNGQPENNYKTTPPVLDSDGSFFLVSKLTVDKSRWQQGNVFSCSVMHEALHNHYTQKSLSLSPGK

SEQ ID NO: 32 - protein, 5 aa, synthetic construct
  REGION 1..5: note = AB0616 CDR H1
SYWMH

SEQ ID NO: 33 - protein, 17 aa, synthetic construct
  REGION 1..17: note = Ab0616 CDR H2
IIHPNSGGTSYAQKFQG

SEQ ID NO: 34 - protein, 8 aa, synthetic construct
  REGION 1..8: note = AB0616 CDR H3
GDYVSRDY

SEQ ID NO: 35 - protein, 12 aa, synthetic construct
  REGION 1..12: note = Ab0616 CDR L1
RASSSVSSSYLH

SEQ ID NO: 36 - protein, 7 aa, synthetic construct
  REGION 1..7: note = Ab0616 CDR L2
STSSRAT

SEQ ID NO: 37 - protein, 9 aa, synthetic construct
  REGION 1..9: note = AB0616 CDR L3
QQYSGYLFT

SEQ ID NO: 38 - protein, 472 aa, synthetic construct
  REGION 1..472: note = AB0617 HC Hole
QVQLVQSGAEVKKPGASVKVSCKASGYTFTSYWMHWVRQAPGQCLEWMGIIHPNSGGTSYAQKFQGRVTMTRDTSTSTVYMELSSLRSEDTAVYYCAMGDYVSRDYWGQGTLVTVSSGGGGSGGGGSGGGGSEIVLTQSPGTLSLSPGERATLSCRASSSVSSSYLHWYQQKPGQAPRLLIYSTSSRATGIPDRFSGSGSGTDFTLTISRLEPEDFAVYYCQQYSGYLFTFGCGTKLEIKGGGGSDKTHTCPPCPAPEAAGGPSVFLFPPKPKDTLMISRTPEVTCVVVDVSHEDPEVKFNWYVDGVEVHNAKTKPREEQYNSTYRVVSVLTVLHQDWLNGKEYKCKVSNKALGAPIEKTISKAKGQPREPQVYTLPPIRELMTSNQVSLSCAVKGFYPSDIAVEWESNGQPENNYKTTPPVLDSDGSFFLVSKLTVDKSRWQQGNVFSCSVMHEALHNHYTQKSLSLSPGK

SEQ ID NO: 39 - protein, 5 aa, synthetic construct
  REGION 1..5: note = AB0617 CDR H1
SYWMH

SEQ ID NO: 40 - protein, 17 aa, synthetic construct
  REGION 1..17: note = Ab0617 CDR H2
IIHPNSGGTSYAQKFQG

SEQ ID NO: 41 - protein, 8 aa, synthetic construct
  REGION 1..8: note = Ab0617 CDR H3
GDYVSRDY

SEQ ID NO: 42 - protein, 12 aa, synthetic construct
  REGION 1..12: note = Ab0617 CDR L1
RASSSVSSSYLH

SEQ ID NO: 43 - protein, 7 aa, synthetic construct
  REGION 1..7: note = Ab0617 CDR L2
STSSRAT

SEQ ID NO: 44 - protein, 9 aa, synthetic construct
  REGION 1..9: note = Ab0617 CDR L3
QQYSGYLFT

SEQ ID NO: 45 - protein, 472 aa, synthetic construct
  REGION 1..472: note = Ab0618 HC Hole
EIVLTQSPGTLSLSPGERATLSCRASSSVSSSYLHWYQQKPGQAPRLLIYSTSSRATGIPDRFSGSGSGTDFTLTISRLEPEDFAVYYCQQYSGYLFTFGCGTKLEIKGGGGSGGGGSGGGGSQVQLVQSGAEVKKPGASVKVSCKASGYTFTSYWMHWVRQAPGQCLEWMGIIHPNSGGTSYAQKFQGRVTMTRDTSTSTVYMELSSLRSEDTAVYYCAMGDYVSRDYWGQGTLVTVSSGGGGSDKTHTCPPCPAPEAAGGPSVFLFPPKPKDTLMISRTPEVTCVVVDVSHEDPEVKFNWYVDGVEVHNAKTKPREEQYNSTYRVVSVLTVLHQDWLNGKEYKCKVSNKALGAPIEKTISKAKGQPREPQVYTLPPIRELMTSNQVSLSCAVKGFYPSDIAVEWESNGQPENNYKTTPPVLDSDGSFFLVSKLTVDKSRWQQGNVFSCSVMHEALHNHYTQKSLSLSPGK

SEQ ID NO: 46 - protein, 5 aa, synthetic construct
  REGION 1..5: note = Ab0618 CDR H1
SYWMH

SEQ ID NO: 47 - protein, 17 aa, synthetic construct
  REGION 1..17: note = Ab0618 CDR H2
IIHPNSGGTSYAQKFQG

SEQ ID NO: 48 - protein, 8 aa, synthetic construct
  REGION 1..8: note = Ab0618 CDR H3
GDYVSRDY

SEQ ID NO: 49 - protein, 12 aa, synthetic construct
  REGION 1..12: note = Ab0618 CDR L1
RASSSVSSSYLH

SEQ ID NO: 50 - protein, 7 aa, synthetic construct
  REGION 1..7: note = Ab0618 CDR L2
STSSRAT

SEQ ID NO: 51 - protein, 9 aa, synthetic construct
  REGION 1..9: note = Ab0618 CDR L3
QQYSGYLFT

SEQ ID NO: 52 - protein, 238 aa, synthetic construct
  REGION 1..238: note = HC Knob Fc-6xHis [1] sequence
GGGGSDKTHTCPPCPAPEAAGGPSVFLFPPKPKDTLMISRTPEVTCVVVDVSHEDPEVKFNWYVDGVEVHNAKTKPREEQYNSTYRVVSVLTVLHQDWLNGKEYKCKVSNKALGAPIEKTISKAKGQPREPMVFDLPPSREEMTKNQVSLWCMVKGFYPSDIAVEWESNGQPENNYKTTPPVLDSDGSFFLYSKLTVDKSRWQQGNVFSCSVMHEALHNHYTQKSLSLSPGKHHHHHH

SEQ ID NO: 53 - protein, 472 aa, synthetic construct
  REGION 1..472: note = Ab0656 HC Hole scFv-Fc
QVQLVQSGAEVKKPGASVKVSCKASGYTFTSYYMHWVRQAPGQGLEWMGIIHPNSGGTSYAQKFQGRVTMTRDTSTSTVYMELSSLRSEDTAVYYCAMGDYVSRDYWGQGTLVTVSSGGGGSGGGGSGGGGSEIVLTQSPGTLSLSPGERATLSCRASSSVSSSYLHWYQQKPGQAPRLLIYSTSSRATGIPDRFSGSGSGTDFTLTISRLEPEDFAVYYCQQYSGYLFTFGQGTKLEIKGGGGSDKTHTCPPCPAPEAAGGPSVFLFPPKPKDTLMISRTPEVTCVVVDVSHEDPEVKFNWYVDGVEVHNAKTKPREEQYNSTYRVVSVLTVLHQDWLNGKEYKCKVSNKALGAPIEKTISKAKGQPREPQVYTLPPIRELMTSNQVSLSCAVKGFYPSDIAVEWESNGQPENNYKTTPPVLDSDGSFFLVSKLTVDKSRWQQGNVFSCSVMHEALHNHYTQKSLSLSPGK

SEQ ID NO: 54 - protein, 5 aa, synthetic construct
  REGION 1..5: note = Ab0656 CDR H1
SYYMH

SEQ ID NO: 55 - protein, 17 aa, synthetic construct
  REGION 1..17: note = Ab0656 CDR H2
IIHPNSGGTSYAQKFQG

SEQ ID NO: 56 - protein, 8 aa, synthetic construct
  REGION 1..8: note = Ab0656 CDR H3
GDYVSRDY

SEQ ID NO: 57 - protein, 12 aa, synthetic construct
  REGION 1..12: note = Ab0656 CDR L1
RASSSVSSSYLH

SEQ ID NO: 58 - protein, 7 aa, synthetic construct
  REGION 1..7: note = Ab0656 CDR L2
STSSRAT

SEQ ID NO: 59 - protein, 9 aa, synthetic construct
  REGION 1..9: note = Ab0656 CDR L3
QQYSGYLFT

SEQ ID NO: 60 - protein, 472 aa, synthetic construct
  REGION 1..472: note = Ab0657 HC Hole scFv-Fc
QVQLVQSGAEVKKPGASVKVSCKASGYTFTSYWMHWVRQAPGQGLEWMGIIHPSSGGTSYAQKFQGRVTMTRDTSTSTVYMELSSLRSEDTAVYYCAMGDYVSRDYWGQGTLVTVSSGGGGSGGGGSGGGGSEIVLTQSPGTLSLSPGERATLSCRASSSVSSSYLHWYQQKPGQAPRLLIYSTSSRATGIPDRFSGSGSGTDFTLTISRLEPEDFAVYYCQQYSGYLFTFGQGTKLEIKGGGGSDKTHTCPPCPAPEAAGGPSVFLFPPKPKDTLMISRTPEVTCVVVDVSHEDPEVKFNWYVDGVEVHNAKTKPREEQYNSTYRVVSVLTVLHQDWLNGKEYKCKVSNKALGAPIEKTISKAKGQPREPQVYTLPPIRELMTSNQVSLSCAVKGFYPSDIAVEWESNGQPENNYKTTPPVLDSDGSFFLVSKLTVDKSRWQQGNVFSCSVMHEALHNHYTQKSLSLSPGK

SEQ ID NO: 61 - protein, 5 aa, synthetic construct
  REGION 1..5: note = Ab0657 CDR H1
SYWMH

SEQ ID NO: 62 - protein, 17 aa, synthetic construct
  REGION 1..17: note = Ab0657 CDR H2
IIHPSSGGTSYAQKFQG

SEQ ID NO: 63 - protein, 8 aa, synthetic construct
  REGION 1..8: note = Ab0657 CDR H3
GDYVSRDY

SEQ ID NO: 64 - protein, 12 aa, synthetic construct
  REGION 1..12: note = Ab0657 CDR L1
RASSSVSSSYLH

SEQ ID NO: 65 - protein, 7 aa, synthetic construct
  REGION 1..7: note = Ab0657 CDR L2
STSSRAT

SEQ ID NO: 66 - protein, 9 aa, synthetic construct
  REGION 1..9: note = Ab0657 CDR L3
QQYSGYLFT

SEQ ID NO: 67 - protein, 472 aa, synthetic construct
  REGION 1..472: note = Ab0658 HC Hole scFv-Fc
QVQLVQSGAEVKKPGASVKVSCKASGYTFTSYWMHWVRQAPGQGLEWMGIIHPNSGGTSYAQKFQGRVTMTRDTSTSTVYMELSSLRSEDTAVYYCAMGDYVSRDYWGQGTLVTVSSGGGGSGGGGSGGGGSEIVLTQSPGTLSLSPGERATLSCRASSSVSSSYLHWYQQKPGQAPRLLIYSTSSRATGIPDRFSGSGSGTDFTLTISRLEPEDFAVYYCQQYSGDLFTFGQGTKLEIKGGGGSDKTHTCPPCPAPEAAGGPSVFLFPPKPKDTLMISRTPEVTCVVVDVSHEDPEVKFNWYVDGVEVHNAKTKPREEQYNSTYRVVSVLTVLHQDWLNGKEYKCKVSNKALGAPIEKTISKAKGQPREPQVYTLPPIRELMTSNQVSLSCAVKGFYPSDIAVEWESNGQPENNYKTTPPVLDSDGSFFLVSKLTVDKSRWQQGNVFSCSVMHEALHNHYTQKSLSLSPGK

SEQ ID NO: 68 - protein, 5 aa, synthetic construct
  REGION 1..5: note = Ab0658 CDR H1
SYWMH

SEQ ID NO: 69 - protein, 17 aa, synthetic construct
  REGION 1..17: note = Ab0658 CDR H2
IIHPNSGGTSYAQKFQG

SEQ ID NO: 70 - protein, 8 aa, synthetic construct
  REGION 1..8: note = Ab0658 CDR H3
GDYVSRDY

SEQ ID NO: 71 - protein, 12 aa, synthetic construct
  REGION 1..12: note = Ab0658 CDR L1
RASSSVSSSYLH

SEQ ID NO: 72 - protein, 7 aa, synthetic construct
  REGION 1..7: note = Ab0658 CDR L2
STSSRAT

SEQ ID NO: 73 - protein, 9 aa, synthetic construct
  REGION 1..9: note = Ab0658 CDR L3
QQYSGDLFT

SEQ ID NO: 74 - protein, 472 aa, synthetic construct
  REGION 1..472: note = Ab0659 HC Hole scFv-Fc
QVQLVQSGAEVKKPGASVKVSCKASGYTFTSYWMHWVRQAPGQGLEWMGIIHPNSGGTSYAQKFQGRVTMTRDTSTSTVYMELSSLRSEDTAVYYCAMGDYVSRDYWGQGTLVTVSSGGGGSGGGGSGGGGSEIVLTQSPGTLSLSPGERATLSCRASSSVSSSYLHWYQQKPGQAPRLLIYSTSSRATGIPDRFSGSGSGTDFTLTISRLEPEDFAVYYCQQYSGSLFTFGQGTKLEIKGGGGSDKTHTCPPCPAPEAAGGPSVFLFPPKPKDTLMISRTPEVTCVVVDVSHEDPEVKFNWYVDGVEVHNAKTKPREEQYNSTYRVVSVLTVLHQDWLNGKEYKCKVSNKALGAPIEKTISKAKGQPREPQVYTLPPIRELMTSNQVSLSCAVKGFYPSDIAVEWESNGQPENNYKTTPPVLDSDGSFFLVSKLTVDKSRWQQGNVFSCSVMHEALHNHYTQKSLSLSPGK

SEQ ID NO: 75 - protein, 5 aa, synthetic construct
  REGION 1..5: note = Ab0659 CDR H1
SYWMH

SEQ ID NO: 76 - protein, 17 aa, synthetic construct
  REGION 1..17: note = Ab0659 CDR H2
IIHPNSGGTSYAQKFQG

SEQ ID NO: 77 - protein, 8 aa, synthetic construct
  REGION 1..8: note = Ab0659 CDR H3
GDYVSRDY

SEQ ID NO: 78 - protein, 12 aa, synthetic construct
  REGION 1..12: note = Ab0659 CDR L1
RASSSVSSSYLH

SEQ ID NO: 79 - protein, 7 aa, synthetic construct
  REGION 1..7: note = Ab0659 CDR L2
STSSRAT

SEQ ID NO: 80 - protein, 9 aa, synthetic construct
  REGION 1..9: note = Ab0659 CDR L3
QQYSGSLFT

SEQ ID NO: 81 - protein, 472 aa, synthetic construct
  REGION 1..472: note = Ab0660 HC Hole scFv-Fc
QVQLVQSGAEVKKPGASVKVSCKASGYTFTSYWMHWVRQAPGQGLEWMGIIHPNSGGTSYAQKFQGRVTMTRDTSTSTVYMELSSLRSEDTAVYYCAMGDYVSRDYWGQGTLVTVSSGGGGSGGGGSGGGGSEIVLTQSPGTLSLSPGERATLSCRASSSVSSSYLHWYQQKPGQAPRLLIYSTSSRATGIPDRFSGSGSGTDFTLTISRLEPEDFAVYYCQQYSGYAFTFGQGTKLEIKGGGGSDKTHTCPPCPAPEAAGGPSVFLFPPKPKDTLMISRTPEVTCVVVDVSHEDPEVKFNWYVDGVEVHNAKTKPREEQYNSTYRVVSVLTVLHQDWLNGKEYKCKVSNKALGAPIEKTISKAKGQPREPQVYTLPPIRELMTSNQVSLSCAVKGFYPSDIAVEWESNGQPENNYKTTPPVLDSDGSFFLVSKLTVDKSRWQQGNVFSCSVMHEALHNHYTQKSLSLSPGK

SEQ ID NO: 82 - protein, 5 aa, synthetic construct
  REGION 1..5: note = Ab0660 CDR H1
SYWMH

SEQ ID NO: 83 - protein, 17 aa, synthetic construct
  REGION 1..17: note = Ab0660 CDR H2
IIHPNSGGTSYAQKFQG

SEQ ID NO: 84 - protein, 8 aa, synthetic construct
  REGION 1..8: note = Ab0660 CDR H3
GDYVSRDY

SEQ ID NO: 85 - protein, 12 aa, synthetic construct
  REGION 1..12: note = Ab0660 CDR L1
RASSSVSSSYLH

SEQ ID NO: 86 - protein, 7 aa, synthetic construct
  REGION 1..7: note = Ab0660 CDR L2
STSSRAT

SEQ ID NO: 87 - protein, 9 aa, synthetic construct
  REGION 1..9: note = Ab0660 CDR L3
QQYSGYAFT

SEQ ID NO: 88 - protein, 472 aa, synthetic construct
  REGION 1..472: note = Ab0661 HC Hole scFv-Fc
QVQLVQSGAEVKKPGASVKVSCKASGYTFTSYWMHWVRQAPGQGLEWMGIIHPNSGGTSYAQKFQGRVTMTRDTSTSTVYMELSSLRSEDTAVYYCAMGDYVSRDYWGQGTLVTVSSGGGGSGGGGSGGGGSEIVLTQSPGTLSLSPGERATLSCRASSSVSSSYLHWYQQKPGQAPRLLIYSTSSRATGIPDRFSGSGSGTDFTLTISRLEPEDFAVYYCQQYSGYDFTFGQGTKLEIKGGGGSDKTHTCPPCPAPEAAGGPSVFLFPPKPKDTLMISRTPEVTCVVVDVSHEDPEVKFNWYVDGVEVHNAKTKPREEQYNSTYRVVSVLTVLHQDWLNGKEYKCKVSNKALGAPIEKTISKAKGQPREPQVYTLPPIRELMTSNQVSLSCAVKGFYPSDIAVEWESNGQPENNYKTTPPVLDSDGSFFLVSKLTVDKSRWQQGNVFSCSVMHEALHNHYTQKSLSLSPGK

SEQ ID NO: 89 - protein, 5 aa, synthetic construct
  REGION 1..5: note = Ab0661 CDR H1
SYWMH

SEQ ID NO: 90 - protein, 17 aa, synthetic construct
  REGION 1..17: note = Ab0661 CDR H2
IIHPNSGGTSYAQKFQG

SEQ ID NO: 91 - protein, 8 aa, synthetic construct
  REGION 1..8: note = Ab0661 CDR H3
GDYVSRDY

SEQ ID NO: 92 - protein, 12 aa, synthetic construct
  REGION 1..12: note = Ab0661 CDR L1
RASSSVSSSYLH

SEQ ID NO: 93 - protein, 7 aa, synthetic construct
  REGION 1..7: note = Ab0661 CDR L2
STSSRAT

SEQ ID NO: 94 - protein, 9 aa, synthetic construct
  REGION 1..9: note = Ab0661 CDR L3
QQYSGYDFT

SEQ ID NO: 95 - protein, 472 aa, synthetic construct
  REGION 1..472: note = Ab0662 HC Hole scFv-Fc
QVQLVQSGAEVKKPGASVKVSCKASGYTFTSYWMHWVRQAPGQGLEWMGIIHPNSGGTSYAQKFQGRVTMTRDTSTSTVYMELSSLRSEDTAVYYCAMGDYVSRDYWGQGTLVTVSSGGGGSGGGGSGGGGSEIVLTQSPGTLSLSPGERATLSCRASSSVSSSYLHWYQQKPGQAPRLLIYSTSSRATGIPDRFSGSGSGTDFTLTISRLEPEDFAVYYCQQYSGYKFTFGQGTKLEIKGGGGSDKTHTCPPCPAPEAAGGPSVFLFPPKPKDTLMISRTPEVTCVVVDVSHEDPEVKFNWYVDGVEVHNAKTKPREEQYNSTYRVVSVLTVLHQDWLNGKEYKCKVSNKALGAPIEKTISKAKGQPREPQVYTLPPIRELMTSNQVSLSCAVKGFYPSDIAVEWESNGQPENNYKTTPPVLDSDGSFFLVSKLTVDKSRWQQGNVFSCSVMHEALHNHYTQKSLSLSPGK

SEQ ID NO: 96 - protein, 5 aa, synthetic construct
  REGION 1..5: note = Ab0662 CDR H1
SYWMH

SEQ ID NO: 97 - protein, 17 aa, synthetic construct
  REGION 1..17: note = Ab0662 CDR H2
IIHPNSGGTSYAQKFQG

SEQ ID NO: 98 - protein, 8 aa, synthetic construct
  REGION 1..8: note = Ab0662 CDR H3
GDYVSRDY

SEQ ID NO: 99 - protein, 12 aa, synthetic construct
  REGION 1..12: note = Ab0662 CDR L1
RASSSVSSSYLH

SEQ ID NO: 100 - protein, 7 aa, synthetic construct
  REGION 1..7: note = Ab0662 CDR L2
STSSRAT

SEQ ID NO: 101 - protein, 9 aa, synthetic construct
  REGION 1..9: note = Ab0662 CDR L3
QQYSGYKFT

SEQ ID NO: 102 - protein, 472 aa, synthetic construct
  REGION 1..472: note = Ab0663 HC Hole scFv-Fc
QVQLVQSGAEVKKPGASVKVSCKASGYTFTSYWMHWVRQAPGQGLEWMGIIHPNSGGTSYAQKFQGRVTMTRDTSTSTVYMELSSLRSEDTAVYYCAMGDYVSRDYWGQGTLVTVSSGGGGSGGGGSGGGGSEIVLTQSPGTLSLSPGERATLSCRASSSVSSSYLHWYQQKPGQAPRLLIYSTSSRATGIPDRFSGSGSGTDFTLTISRLEPEDFAVYYCQQYSGYQFTFGQGTKLEIKGGGGSDKTHTCPPCPAPEAAGGPSVFLFPPKPKDTLMISRTPEVTCVVVDVSHEDPEVKFNWYVDGVEVHNAKTKPREEQYNSTYRVVSVLTVLHQDWLNGKEYKCKVSNKALGAPIEKTISKAKGQPREPQVYTLPPIRELMTSNQVSLSCAVKGFYPSDIAVEWESNGQPENNYKTTPPVLDSDGSFFLVSKLTVDKSRWQQGNVFSCSVMHEALHNHYTQKSLSLSPGK

SEQ ID NO: 103 - protein, 5 aa, synthetic construct
  REGION 1..5: note = Ab0663 CDR H1
SYWMH

SEQ ID NO: 104 - protein, 17 aa, synthetic construct
  REGION 1..17: note = Ab0663 CDR H2
IIHPNSGGTSYAQKFQG

SEQ ID NO: 105 - protein, 8 aa, synthetic construct
  REGION 1..8: note = Ab0663 CDR H3
GDYVSRDY

SEQ ID NO: 106 - protein, 12 aa, synthetic construct
  REGION 1..12: note = Ab0663 CDR L1
RASSSVSSSYLH

SEQ ID NO: 107 - protein, 7 aa, synthetic construct
  REGION 1..7: note = Ab0663 CDR L2
STSSRAT

SEQ ID NO: 108 - protein, 9 aa, synthetic construct
  REGION 1..9: note = Ab0663 CDR L3
QQYSGYQFT

SEQ ID NO: 109 - protein, 472 aa, synthetic construct
  REGION 1..472: note = Ab0664 HC Hole scFv-Fc
QVQLVQSGAEVKKPGASVKVSCKASGYTFTSYWMHWVRQAPGQGLEWMGIIHPNSGGTSYAQKFQGRVTMTRDTSTSTVYMELSSLRSEDTAVYYCAMGDYVSRDYWGQGTLVTVSSGGGGSGGGGSGGGGSEIVLTQSPGTLSLSPGERATLSCRASSSVSSSYLHWYQQKPGQAPRLLIYSTSSRATGIPDRFSGSGSGTDFTLTISRLEPEDFAVYYCQQYSGYSFTFGQGTKLEIKGGGGSDKTHTCPPCPAPEAAGGPSVFLFPPKPKDTLMISRTPEVTCVVVDVSHEDPEVKFNWYVDGVEVHNAKTKPREEQYNSTYRVVSVLTVLHQDWLNGKEYKCKVSNKALGAPIEKTISKAKGQPREPQVYTLPPIRELMTSNQVSLSCAVKGFYPSDIAVEWESNGQPENNYKTTPPVLDSDGSFFLVSKLTVDKSRWQQGNVFSCSVMHEALHNHYTQKSLSLSPGK

SEQ ID NO: 110 - protein, 5 aa, synthetic construct
  REGION 1..5: note = Ab0664 CDR H1
SYWMH

SEQ ID NO: 111 - protein, 17 aa, synthetic construct
  REGION 1..17: note = Ab0664 CDR H2
IIHPNSGGTSYAQKFQG

SEQ ID NO: 112 - protein, 8 aa, synthetic construct
  REGION 1..8: note = Ab0664 CDR H3
GDYVSRDY

SEQ ID NO: 113 - protein, 12 aa, synthetic construct
  REGION 1..12: note = Ab0664 CDR L1
RASSSVSSSYLH

SEQ ID NO: 114 - protein, 7 aa, synthetic construct
  REGION 1..7: note = Ab0664 CDR L2
STSSRAT

SEQ ID NO: 115 - protein, 9 aa, synthetic construct
  REGION 1..9: note = Ab0664 CDR L3
QQYSGYSFT

SEQ ID NO: 116 - protein, 472 aa, synthetic construct
  REGION 1..472: note = Ab0665 HC Hole scFv-Fc
QVQLVQSGAEVKKPGASVKVSCKASGYTFTSYWMHWVRQAPGQGLEWMGIIHPNSGGTSYAQKFQGRVTMTRDTSTSTVYMELSSLRSEDTAVYYCAMGDYVSRDYWGQGTLVTVSSGGGGSGGGGSGGGGSEIVLTQSPGTLSLSPGERATLSCRASSSVSSSYLHWYQQKPGQAPRLLIYSTSSRATGIPDRFSGSGSGTDFTLTISRLEPEDFAVYYCQQYSGYLATFGQGTKLEIKGGGGSDKTHTCPPCPAPEAAGGPSVFLFPPKPKDTLMISRTPEVTCVVVDVSHEDPEVKFNWYVDGVEVHNAKTKPREEQYNSTYRVVSVLTVLHQDWLNGKEYKCKVSNKALGAPIEKTISKAKGQPREPQVYTLPPIRELMTSNQVSLSCAVKGFYPSDIAVEWESNGQPENNYKTTPPVLDSDGSFFLVSKLTVDKSRWQQGNVFSCSVMHEALHNHYTQKSLSLSPGK

SEQ ID NO: 117 - protein, 5 aa, synthetic construct
  REGION 1..5: note = Ab0665 CDR H1
SYWMH

SEQ ID NO: 118 - protein, 17 aa, synthetic construct
  REGION 1..17: note = Ab0665 CDR H2
IIHPNSGGTSYAQKFQG

SEQ ID NO: 119 - protein, 8 aa, synthetic construct
  REGION 1..8: note = Ab0665 CDR H3
GDYVSRDY

SEQ ID NO: 120 - protein, 12 aa, synthetic construct
  REGION 1..12: note = Ab0665 CDR L1
RASSSVSSSYLH

SEQ ID NO: 121 - protein, 7 aa, synthetic construct
  REGION 1..7: note = Ab0665 CDR L2
STSSRAT

SEQ ID NO: 122 - protein, 9 aa, synthetic construct
  REGION 1..9: note = Ab0665 CDR L3
QQYSGYLAT

SEQ ID NO: 123 - protein, 472 aa, synthetic construct
  REGION 1..472: note = Ab0666 HC Hole scFv-Fc
QVQLVQSGAEVKKPGASVKVSCKASGYTFTSYWMHWVRQAPGQGLEWMGIIHPNSGGTSYAQKFQGRVTMTRDKSTSTVYMELSSLRSEDTAVYYCAMGDYVSRDYWGQGTLVTVSSGGGGSGGGGSGGGGSEIVLTQSPGTLSLSPGERATLSCRASSSVSSSYLHWYQQKPGQAPRLLIYSTSSRATGIPDRFSGSGSGTDFTLTISRLEPEDFAVYYCQQYSGYLFTFGQGTKLEIKGGGGSDKTHTCPPCPAPEAAGGPSVFLFPPKPKDTLMISRTPEVTCVVVDVSHEDPEVKFNWYVDGVEVHNAKTKPREEQYNSTYRVVSVLTVLHQDWLNGKEYKCKVSNKALGAPIEKTISKAKGQPREPQVYTLPPIRELMTSNQVSLSCAVKGFYPSDIAVEWESNGQPENNYKTTPPVLDSDGSFFLVSKLTVDKSRWQQGNVFSCSVMHEALHNHYTQKSLSLSPGK

SEQ ID NO: 124 - protein, 5 aa, synthetic construct
  REGION 1..5: note = Ab0666 CDR H1
SYWMH

SEQ ID NO: 125 - protein, 17 aa, synthetic construct
  REGION 1..17: note = Ab0666 CDR H2
IIHPNSGGTSYAQKFQG

SEQ ID NO: 126 - protein, 8 aa, synthetic construct
  REGION 1..8: note = Ab0666 CDR H3
GDYVSRDY

SEQ ID NO: 127 - protein, 12 aa, synthetic construct
  REGION 1..12: note = Ab0666 CDR L1
RASSSVSSSYLH

SEQ ID NO: 128 - protein, 7 aa, synthetic construct
  REGION 1..7: note = Ab0666 CDR L2
STSSRAT

SEQ ID NO: 129 - protein, 9 aa, synthetic construct
  REGION 1..9: note = Ab0666 CDR L3
QQYSGYLFT

SEQ ID NO: 130 - protein, 472 aa, synthetic construct
  REGION 1..472: note = Ab0667 HC Hole scFv-Fc
QVQLVQSGAEVKKPGASVKVSCKASGYTFTSYWMHWVRQAPGQGLEWMGIIHPNSGGTSYAQKFQGRVTMTRDTSTSTAYMELSSLRSEDTAVYYCAMGDYVSRDYWGQGTLVTVSSGGGGSGGGGSGGGGSEIVLTQSPGTLSLSPGERATLSCRASSSVSSSYLHWYQQKPGQAPRLLIYSTSSRATGIPDRFSGSGSGTDFTLTISRLEPEDFAVYYCQQYSGYLFTFGQGTKLEIKGGGGSDKTHTCPPCPAPEAAGGPSVFLFPPKPKDTLMISRTPEVTCVVVDVSHEDPEVKFNWYVDGVEVHNAKTKPREEQYNSTYRVVSVLTVLHQDWLNGKEYKCKVSNKALGAPIEKTISKAKGQPREPQVYTLPPIRELMTSNQVSLSCAVKGFYPSDIAVEWESNGQPENNYKTTPPVLDSDGSFFLVSKLTVDKSRWQQGNVFSCSVMHEALHNHYTQKSLSLSPGK

SEQ ID NO: 131 - protein, 5 aa, synthetic construct
  REGION 1..5: note = Ab0667 CDR H1
SYWMH

SEQ ID NO: 132 - protein, 17 aa, synthetic construct
  REGION 1..17: note = Ab0667 CDR H2
IIHPNSGGTSYAQKFQG

SEQ ID NO: 133 - protein, 8 aa, synthetic construct
  REGION 1..8: note = Ab0667 CDR H3
GDYVSRDY

SEQ ID NO: 134 - protein, 12 aa, synthetic construct
  REGION 1..12: note = Ab0667 CDR L1
RASSSVSSSYLH

SEQ ID NO: 135 - protein, 7 aa, synthetic construct
  REGION 1..7: note = Ab0667 CDR L2
STSSRAT

SEQ ID NO: 136 - protein, 9 aa, synthetic construct
  REGION 1..9: note = Ab0667 CDR L3
QQYSGYLFT

SEQ ID NO: 137 - protein, 472 aa, synthetic construct
  REGION 1..472: note = Ab0668 HC Hole scFv-Fc
QVQLVQSGAEVKKPGASVKVSCKASGYTFTSYWMHWVRQAPGQGLEWMGIIHPNSGGTSYAQKFQGRVTMTRDTSTSTVYMELSSLRSEDTAVYYCAMGDYVSRDYWGQGTLVTVSSGGGGSGGGGSGGGGSEIVLTQSPGTLSLSPGERATLSCRASSSVSSSYLHWYQQKPGQAPRLWIYSTSSRATGIPDRFSGSGSGTDFTLTISRLEPEDFAVYYCQQYSGYLFTFGQGTKLEIKGGGGSDKTHTCPPCPAPEAAGGPSVFLFPPKPKDTLMISRTPEVTCVVVDVSHEDPEVKFNWYVDGVEVHNAKTKPREEQYNSTYRVVSVLTVLHQDWLNGKEYKCKVSNKALGAPIEKTISKAKGQPREPQVYTLPPIRELMTSNQVSLSCAVKGFYPSDIAVEWESNGQPENNYKTTPPVLDSDGSFFLVSKLTVDKSRWQQGNVFSCSVMHEALHNHYTQKSLSLSPGK

SEQ ID NO: 138 - protein, 5 aa, synthetic construct
  REGION 1..5: note = Ab0668 CDR H1
SYWMH

SEQ ID NO: 139 - protein, 17 aa, synthetic construct
  REGION 1..17: note = Ab0668 CDR H2
IIHPNSGGTSYAQKFQG

SEQ ID NO: 140 - protein, 8 aa, synthetic construct
  REGION 1..8: note = Ab0668 CDR H3
GDYVSRDY

SEQ ID NO: 141 - protein, 12 aa, synthetic construct
  REGION 1..12: note = Ab0668 CDR L1
RASSSVSSSYLH

SEQ ID NO: 142 - protein, 7 aa, synthetic construct
  REGION 1..7: note = Ab0668 CDR L2
STSSRAT

SEQ ID NO: 143 - protein, 9 aa, synthetic construct
  REGION 1..9: note = Ab0668 CDR L3
QQYSGYLFT

SEQ ID NO: 144 - protein, 472 aa, synthetic construct
  REGION 1..472: note = Ab0669 HC Hole scFv-Fc
QVQLVQSGAEVKKPGASVKVSCKASGYTFTSYWMHWVRQAPGQGLEWMGIIHPNSGGTSYAQKFQGRVTMTRDTSTSTVYMELSSLRSEDTAVYYCAMGDYVSRDYWGQGTLVTVSSGGGGSGGGGSGGGGSEIVLTQSPGTLSLSPGERATLSCRASSSVSSSYLHWYQQKPGQAPRLLIYSTSSRATGIPDRFSGSGSGTDYTLTISRLEPEDFAVYYCQQYSGYLFTFGQGTKLEIKGGGGSDKTHTCPPCPAPEAAGGPSVFLFPPKPKDTLMISRTPEVTCVVVDVSHEDPEVKFNWYVDGVEVHNAKTKPREEQYNSTYRVVSVLTVLHQDWLNGKEYKCKVSNKALGAPIEKTISKAKGQPREPQVYTLPPIRELMTSNQVSLSCAVKGFYPSDIAVEWESNGQPENNYKTTPPVLDSDGSFFLVSKLTVDKSRWQQGNVFSCSVMHEALHNHYTQKSLSLSPGK

SEQ ID NO: 145 - protein, 5 aa, synthetic construct
  REGION 1..5: note = Ab0669 CDR H1
SYWMH

SEQ ID NO: 146 - protein, 17 aa, synthetic construct
  REGION 1..17: note = Ab0669 CDR H2
IIHPNSGGTSYAQKFQG

SEQ ID NO: 147 - protein, 8 aa, synthetic construct
  REGION 1..8: note = Ab0669 CDR H3
GDYVSRDY

SEQ ID NO: 148 - protein, 12 aa, synthetic construct
  REGION 1..12: note = Ab0669 CDR L1
RASSSVSSSYLH

SEQ ID NO: 149 - protein, 7 aa, synthetic construct
  REGION 1..7: note = Ab0669 CDR L2
STSSRAT

SEQ ID NO: 150 - protein, 9 aa, synthetic construct
  REGION 1..9: note = Ab0669 CDR L3
QQYSGYLFT

SEQ ID NO: 151 - protein, 238 aa, synthetic construct; identical to SEQ ID NO: 52
  REGION 1..238: note = HC Knob Fc-6xHis [1] sequence

SEQ ID NO: 152 - protein, 472 aa, synthetic construct
  REGION 1..472: note = Ab0726 HC Hole scFv-Fc
EIVLTQSPGTLSLSPGERATLSCRASSSVSSSYLHWYQQKPGQAPRLLIYSTSSRATGIPDRFSGSGSGTDFTLTISRLEPEDFAVYYCQQYSGYQFTFGCGTKLEIKGGGGSGGGGSGGGGSQVQLVQSGAEVKKPGASVKVSCKASGYTFTSYWMHWVRQAPGQCLEWMGIIHPNSGGTSYAQKFQGRVTMTRDTSTSTVYMELSSLRSEDTAVYYCAMGDYVSRDYWGQGTLVTVSSGGGGSDKTHTCPPCPAPEAAGGPSVFLFPPKPKDTLMISRTPEVTCVVVDVSHEDPEVKFNWYVDGVEVHNAKTKPREEQYNSTYRVVSVLTVLHQDWLNGKEYKCKVSNKALGAPIEKTISKAKGQPREPQVYTLPPIRELMTSNQVSLSCAVKGFYPSDIAVEWESNGQPENNYKTTPPVLDSDGSFFLVSKLTVDKSRWQQGNVFSCSVMHEALHNHYTQKSLSLSPGK

SEQ ID NO: 153 - protein, 238 aa, synthetic construct; identical to SEQ ID NO: 52
  REGION 1..238: note = Ab0726 HC Knob Fc-6xHis

SEQ ID NO: 154 - protein, 5 aa, synthetic construct
  REGION 1..5: note = Ab0726 CDR H1
SYWMH

SEQ ID NO: 155 - protein, 17 aa, synthetic construct
  REGION 1..17: note = Ab0726 CDR H2
IIHPNSGGTSYAQKFQG

SEQ ID NO: 156 - protein, 8 aa, synthetic construct
  REGION 1..8: note = Ab0726 CDR H3
GDYVSRDY

SEQ ID NO: 157 - protein, 12 aa, synthetic construct
  REGION 1..12: note = Ab0726 CDR L1
RASSSVSSSYLH

SEQ ID NO: 158 - protein, 7 aa, synthetic construct
  REGION 1..7: note = Ab0726 CDR L2
STSSRAT

SEQ ID NO: 159 - protein, 9 aa, synthetic construct
  REGION 1..9: note = Ab0726 CDR L3
QQYSGYQFT

SEQ ID NO: 160 - protein, 472 aa, synthetic construct
  REGION 1..472: note = AB0727 HC Hole scFv-Fc
EIVLTQSPGTLSLSPGERATLSCRASSSVSSSYLHWYQQKPGQAPRLLIYSTSSRATGIPDRFSGSGSGTDFTLTISRLEPEDFAVYYCQQYSGYQFTFGCGTKLEIKGGGGSGGGGSGGGGSQVQLVQSGAEVKKPGASVKVSCKASGYTFTSYWMHWVRQAPGQCLEWMGVIHPNSGGTSYAQKFQGRVTMTRDTSTSTVYMELSSLRSEDTAVYYCAMGDYVSRDYWGQGTLVTVSSGGGGSDKTHTCPPCPAPEAAGGPSVFLFPPKPKDTLMISRTPEVTCVVVDVSHEDPEVKFNWYVDGVEVHNAKTKPREEQYNSTYRVVSVLTVLHQDWLNGKEYKCKVSNKALGAPIEKTISKAKGQPREPQVYTLPPIRELMTSNQVSLSCAVKGFYPSDIAVEWESNGQPENNYKTTPPVLDSDGSFFLVSKLTVDKSRWQQGNVFSCSVMHEALHNHYTQKSLSLSPGK

SEQ ID NO: 161 - protein, 238 aa, synthetic construct; identical to SEQ ID NO: 52
  REGION 1..238: note = Ab0727 HC Knob Fc-6xHis

SEQ ID NO: 162 - protein, 5 aa, synthetic construct
  REGION 1..5: note = Ab0727 CDR H1
SYWMH

SEQ ID NO: 163 - protein, 17 aa, synthetic construct
  REGION 1..17: note = Ab0727 CDR H2
VIHPNSGGTSYAQKFQG

SEQ ID NO: 164 - protein, 8 aa, synthetic construct
  REGION 1..8: note = Ab0727 CDR H3
GDYVSRDY

SEQ ID NO: 165 - protein, 12 aa, synthetic construct
  REGION 1..12: note = Ab0727 CDR L1
RASSSVSSSYLH

SEQ ID NO: 166 - protein, 7 aa, synthetic construct
  REGION 1..7: note = Ab0727 CDR L2
STSSRAT

SEQ ID NO: 167 - protein, 9 aa, synthetic construct
  REGION 1..9: note = Ab0727 CDR L3
QQYSGYQFT

SEQ ID NO: 168 - protein, 472 aa, synthetic construct
  REGION 1..472: note = Ab0728 HC Hole scFv-Fc
QVQLVQSGAEVKKPGASVKVSCKASGYTFTSYWMHWVRQAPGQGLEWMGIIHPNSGGTSYAQKFQGRVTMTRDTSTSTVYMELSSLRSEDTAVYYCAMGDYVSRDYWGQGTLVTVSSGGGGSGGGGSGGGGSEIVLTQSPGTLSLSPGERATLSCRASSSVSSSYLHWYQQKPGQAPRLLIYSTSNLASGIPDRFSGSGSGTDFTLTISRLEPEDFAVYYCQQYSGYQFTFGQGTKLEIKGGGGSDKTHTCPPCPAPEAAGGPSVFLFPPKPKDTLMISRTPEVTCVVVDVSHEDPEVKFNWYVDGVEVHNAKTKPREEQYNSTYRVVSVLTVLHQDWLNGKEYKCKVSNKALGAPIEKTISKAKGQPREPQVYTLPPIRELMTSNQVSLSCAVKGFYPSDIAVEWESNGQPENNYKTTPPVLDSDGSFFLVSKLTVDKSRWQQGNVFSCSVMHEALHNHYTQKSLSLSPGK

SEQ ID NO: 169 - protein, 238 aa, synthetic construct; identical to SEQ ID NO: 52
  REGION 1..238: note = Ab0728 HC Knob Fc-6xHis

SEQ ID NO: 170 - protein, 5 aa, synthetic construct
  REGION 1..5: note = Ab0728 CDR H1
SYWMH

SEQ ID NO: 171 - protein, 17 aa, synthetic construct
  REGION 1..17: note = Ab0728 CDR H2
IIHPNSGGTSYAQKFQG

SEQ ID NO: 172 - protein, 8 aa, synthetic construct
  REGION 1..8: note = Ab0728 CDR H3
GDYVSRDY

SEQ ID NO: 173 - protein, 12 aa, synthetic construct
  REGION 1..12: note = Ab0728 CDR L1
RASSSVSSSYLH

SEQ ID NO: 174 - protein, 7 aa, synthetic construct
  REGION 1..7: note = Ab0728 CDR L2
STSNLAS

SEQ ID NO: 175 - protein, 9 aa, synthetic construct
  REGION 1..9: note = Ab0728 CDR L3
QQYSGYQFT

SEQ ID NO: 176 - protein, 472 aa, synthetic construct
  REGION 1..472: note = Ab0729 HC Hole scFv-Fc
QVQLVQSGAEVKKPGASVKVSCKASGYTFTSYWMHWVRQAPGQGLEWMGIIHPNSGGTSYAQKFQGRVTMTRDTSTSTVYMELSSLRSEDTAVYYCAMGDYVSRDYWGQGTLVTVSSGGGGSGGGGSGGGGSEIVLTQSPGTLSLSPGERATLSCRASSSVSSSYLHWYQQKPGQAPRLLIYSTSNLASGVPARFSGSGSGTDFTLTISRLEPEDFAVYYCQQYSGYQFTFGQGTKLEIKGGGGSDKTHTCPPCPAPEAAGGPSVFLFPPKPKDTLMISRTPEVTCVVVDVSHEDPEVKFNWYVDGVEVHNAKTKPREEQYNSTYRVVSVLTVLHQDWLNGKEYKCKVSNKALGAPIEKTISKAKGQPREPQVYTLPPIRELMTSNQVSLSCAVKGFYPSDIAVEWESNGQPENNYKTTPPVLDSDGSFFLVSKLTVDKSRWQQGNVFSCSVMHEALHNHYTQKSLSLSPGK

SEQ ID NO: 177 - protein, 238 aa, synthetic construct; identical to SEQ ID NO: 52
  REGION 1..238: note = Ab0729 HC Knob Fc-6xHis

SEQ ID NO: 178 - protein, 5 aa, synthetic construct
  REGION 1..5: note = Ab0729 CDR H1
SYWMH

SEQ ID NO: 179 - protein, 17 aa, synthetic construct
  REGION 1..17: note = Ab0729 CDR H2
IIHPNSGGTSYAQKFQG

SEQ ID NO: 180 - protein, 8 aa, synthetic construct
  REGION 1..8: note = Ab0729 CDR H3
GDYVSRDY

SEQ ID NO: 181 - protein, 12 aa, synthetic construct
  REGION 1..12: note = Ab0729 CDR L1
RASSSVSSSYLH

SEQ ID NO: 182 - protein, 7 aa, synthetic construct
  REGION 1..7: note = Ab0729 CDR L2
STSNLAS

SEQ ID NO: 183 - protein, 9 aa, synthetic construct
  REGION 1..9: note = Ab0729 CDR L3
QQYSGYQFT

SEQ ID NO: 184 - protein, 472 aa, synthetic construct
  REGION 1..472: note = Ab0730 HC Hole scFv-Fc
QVQLVQSGAEVKKPGASVKVSCKASGYTFTSYWMHWVRQAPGQGLEWMGIIHPNSGGTSYAQKFQGRVTMTRDTSTSTVYMELSSLRSEDTAVYYCAMGDYVSRDYWGQGTLVTVSSGGGGSGGGGSGGGGSEIVLTQSPGTLSLSPGERATLSCRASSSVSSSYLHWYQQKPGQAPRLWIYSTSNLASGVPARFSGSGSGTDFTLTISRLEPEDFAVYYCQQYSGYQFTFGQGTKLEIKGGGGSDKTHTCPPCPAPEAAGGPSVFLFPPKPKDTLMISRTPEVTCVVVDVSHEDPEVKFNWYVDGVEVHNAKTKPREEQYNSTYRVVSVLTVLHQDWLNGKEYKCKVSNKALGAPIEKTISKAKGQPREPQVYTLPPIRELMTSNQVSLSCAVKGFYPSDIAVEWESNGQPENNYKTTPPVLDSDGSFFLVSKLTVDKSRWQQGNVFSCSVMHEALHNHYTQKSLSLSPGK

SEQ ID NO: 185 - protein, 238 aa, synthetic construct; identical to SEQ ID NO: 52
  REGION 1..238: note = Ab0730 HC Knob Fc-6xHis

SEQ ID NO: 186 - protein, 5 aa, synthetic construct
  REGION 1..5: note = Ab0730 CDR H1
SYWMH

SEQ ID NO: 187 - protein, 17 aa, synthetic construct
  REGION 1..17: note = Ab0730 CDR H2
IIHPNSGGTSYAQKFQG

SEQ ID NO: 188 - protein, 8 aa, synthetic construct
  REGION 1..8: note = Ab0730 CDR H3
GDYVSRDY

SEQ ID NO: 189 - protein, 12 aa, synthetic construct
  REGION 1..12: note = Ab0730 CDR L1
RASSSVSSSYLH

SEQ ID NO: 190 - protein, 7 aa, synthetic construct
  REGION 1..7: note = Ab0730 CDR L2
STSNLAS

SEQ ID NO: 191 - protein, 9 aa, synthetic construct
  REGION 1..9: note = Ab0730 CDR L3
QQYSGYQFT

SEQ ID NO: 192 - protein, 472 aa, synthetic construct
  REGION 1..472: note = Ab0731 HC Hole scFv-Fc
EIVLTQSPGTLSLSPGERATLSCRASSSVSSSYLHWYQQKPGQAPRLLIYSTSNLASGIPDRFSGSGSGTDFTLTISRLEPEDFAVYYCQQYSGYQFTFGCGTKLEIKGGGGSGGGGSGGGGSQVQLVQSGAEVKKPGASVKVSCKASGYTFTSYWMHWVRQAPGQCLEWMGVIHPNSGGTSYAQKFQGRVTMTRDTSTSTVYMELSSLRSEDTAVYYCAMGDYVSRDYWGQGTLVTVSSGGGGSDKTHTCPPCPAPEAAGGPSVFLFPPKPKDTLMISRTPEVTCVVVDVSHEDPEVKFNWYVDGVEVHNAKTKPREEQYNSTYRVVSVLTVLHQDWLNGKEYKCKVSNKALGAPIEKTISKAKGQPREPQVYTLPPIRELMTSNQVSLSCAVKGFYPSDIAVEWESNGQPENNYKTTPPVLDSDGSFFLVSKLTVDKSRWQQGNVFSCSVMHEALHNHYTQKSLSLSPGK

SEQ ID NO: 193 - protein, 238 aa, synthetic construct; identical to SEQ ID NO: 52
  REGION 1..238: note = Ab0731 HC Knob Fc-6xHis

SEQ ID NO: 194 - protein, 5 aa, synthetic construct
  REGION 1..5: note = Ab0731 CDR H1
SYWMH

SEQ ID NO: 195 - protein, 17 aa, synthetic construct
  REGION 1..17: note = Ab0731 CDR H2
IIHPNSGGTSYAQKFQG

SEQ ID NO: 196 - protein, 8 aa, synthetic construct
  REGION 1..8: note = Ab0731 CDR H3
GDYVSRDY

SEQ ID NO: 197 - protein, 12 aa, synthetic construct
  REGION 1..12: note = Ab0731 CDR L1
RASSSVSSSYLH

SEQ ID NO: 198 - protein, 7 aa, synthetic construct
  REGION 1..7: note = Ab0731 CDR L2
STSNLAS

SEQ ID NO: 199 - protein, 9 aa, synthetic construct
  REGION 1..9: note = Ab0731 CDR L3
QQYSGYQFT

SEQ ID NO: 200 - protein, 472 aa, synthetic construct
  REGION 1..472: note = Ab0732 HC Hole scFv-Fc
EIVLTQSPGTLSLSPGERATLSCRASSSVSSSYLHWYQQKPGQAPRLLIYSTSNLASGVPARFSGSGSGTDFTLTISRLEPEDFAVYYCQQYSGYQFTFGCGTKLEIKGGGGSGGGGSGGGGSQVQLVQSGAEVKKPGASVKVSCKASGYTFTSYWMHWVRQAPGQCLEWMGVIHPNSGGTSYAQKFQGRVTMTRDTSTSTVYMELSSLRSEDTAVYYCAMGDYVSRDYWGQGTLVTVSSGGGGSDKTHTCPPCPAPEAAGGPSVFLFPPKPKDTLMISRTPEVTCVVVDVSHEDPEVKFNWYVDGVEVHNAKTKPREEQYNSTYRVVSVLTVLHQDWLNGKEYKCKVSNKALGAPIEKTISKAKGQPREPQVYTLPPIRELMTSNQVSLSCAVKGFYPSDIAVEWESNGQPENNYKTTPPVLDSDGSFFLVSKLTVDKSRWQQGNVFSCSVMHEALHNHYTQKSLSLSPGK

SEQ ID NO: 201 - protein, 238 aa, synthetic construct; identical to SEQ ID NO: 52
  REGION 1..238: note = Ab0732 HC Knob Fc-6xHis

SEQ ID NO: 202 - protein, 5 aa, synthetic construct
  REGION 1..5: note = Ab0732 CDR H1
SYWMH

SEQ ID NO: 203 - protein, 17 aa, synthetic construct
  REGION 1..17: note = Ab0732 CDR H2
VIHPNSGGTSYAQKFQG

SEQ ID NO: 204 - protein, 8 aa, synthetic construct
  REGION 1..8: note = Ab0732 CDR H3
GDYVSRDY

SEQ ID NO: 205 - protein, 12 aa, synthetic construct
  REGION 1..12: note = Ab0732 CDR L1
RASSSVSSSYLH

SEQ ID NO: 206 - protein, 7 aa, synthetic construct
  REGION 1..7: note = Ab0732 CDR L2
STSNLAS

SEQ ID NO: 207 - protein, 9 aa, synthetic construct
  REGION 1..9: note = Ab0732 CDR L3
QQYSGYQFT

SEQ ID NO: 208 - protein, 472 aa, synthetic construct
  REGION 1..472: note = Ab0733 HC Hole scFv-Fc
EIVLTQSPGTLSLSPGERATLSCRASSSVSSSYLHWYQQKPGQAPRLWIYSTSNLASGVPARFSGSGSGTDFTLTISRLEPEDFAVYYCQQYSGYQFTFGCGTKLEIKGGGGSGGGGSGGGGSQVQLVQSGAEVKKPGASVKVSCKASGYTFTSYWMHWVRQAPGQCLEWMGVIHPNSGGTSYAQKFQGRVTMTRDTSTSTVYMELSSLRSEDTAVYYCAMGDYVSRDYWGQGTLVTVSSGGGGSDKTHTCPPCPAPEAAGGPSVFLFPPKPKDTLMISRTPEVTCVVVDVSHEDPEVKFNWYVDGVEVHNAKTKPREEQYNSTYRVVSVLTVLHQDWLNGKEYKCKVSNKALGAPIEKTISKAKGQPREPQVYTLPPIRELMTSNQVSLSCAVKGFYPSDIAVEWESNGQPENNYKTTPPVLDSDGSFFLVSKLTVDKSRWQQGNVFSCSVMHEALHNHYTQKSLSLSPGK

SEQ ID NO: 209 - protein, 238 aa, synthetic construct; identical to SEQ ID NO: 52
  REGION 1..238: note = Ab0733 HC Knob Fc-6xHis

SEQ ID NO: 210 - protein, 5 aa, synthetic construct
  REGION 1..5: note = Ab0733 CDR H1
SYWMH

SEQ ID NO: 211 - protein, 17 aa, synthetic construct
  REGION 1..17: note = Ab0733 CDR H2
VIHPNSGGTSYAQKFQG

SEQ ID NO: 212 - protein, 8 aa, synthetic construct
  REGION 1..8: note = Ab0733 CDR H3
GDYVSRDY

SEQ ID NO: 213 - protein, 12 aa, synthetic construct
  REGION 1..12: note = Ab0733 CDR L1
RASSSVSSSYLH

SEQ ID NO: 214 - protein, 7 aa, synthetic construct
  REGION 1..7: note = Ab0733 CDR L2
STSNLAS

SEQ ID NO: 215 - protein, 9 aa, synthetic construct
  REGION 1..9: note = Ab0733 CDR L3
QQYSGYQFT

SEQ ID NO: 216 - protein, 472 aa, synthetic construct
  REGION 1..472: note = Ab0734 HC Hole scFv-Fc
QVQLVQSGAEVKKPGASVKVSCKASGYTFTSYWMHWVRQAPGQGLEWMGMIHPNSGGTNYAQKFQGRVTMTRDTSTSTVYMELSSLRSEDTAVYYCAMGDYVSRDYWGQGTLVTVSSGGGGSGGGGSGGGGSEIVLTQSPGTLSLSPGERATLSCRASSSVSSSYLHWYQQKPGQAPRLLIYSTSSRATGIPDRFSGSGSGTDFTLTISRLEPEDFAVYYCQQYSGYQFTFGQGTKLEIKGGGGSDKTHTCPPCPAPEAAGGPSVFLFPPKPKDTLMISRTPEVTCVVVDVSHEDPEVKFNWYVDGVEVHNAKTKPREEQYNSTYRVVSVLTVLHQDWLNGKEYKCKVSNKALGAPIEKTISKAKGQPREPQVYTLPPIRELMTSNQVSLSCAVKGFYPSDIAVEWESNGQPENNYKTTPPVLDSDGSFFLVSKLTVDKSRWQQGNVFSCSVMHEALHNHYTQKSLSLSPGK

SEQ ID NO: 217 - protein, 238 aa, synthetic construct; identical to SEQ ID NO: 52
  REGION 1..238: note = Ab0734 HC Knob Fc-6xHis

SEQ ID NO: 218 - protein, 5 aa, synthetic construct
  REGION 1..5: note = Ab0734 CDR H1
SYWMH

SEQ ID NO: 219 - protein, 17 aa, synthetic construct
  REGION 1..17: note = Ab0734 CDR H2
MIHPNSGGTNYAQKFQG

SEQ ID NO: 220 - protein, 8 aa, synthetic construct
  REGION 1..8: note = Ab0734 CDR H3
GDYVSRDY

SEQ ID NO: 221 - protein, 12 aa, synthetic construct
  REGION 1..12: note = Ab0734 CDR L1
RASSSVSSSYLH

SEQ ID NO: 222 - protein, 7 aa, synthetic construct
  REGION 1..7: note = Ab0734 CDR L2
STSSRAT

SEQ ID NO: 223 - protein, 9 aa, synthetic construct
  REGION 1..9: note = Ab0734 CDR L3
QQYSGYQFT

SEQ ID NO: 224 - protein, 472 aa, synthetic construct
  REGION 1..472: note = Ab0735 HC Hole scFv-Fc
QVQLVQSGAEVKKPGASVKVSCKASGYTFTSYWMHWVRQAPGQGLEWIGMIHPNSGGTNYAQKFQGRATLTRDTSTSTVYMELSSLRSEDTAVYYCAMGDYVSRDYWGQGTLVTVSSGGGGSGGGGSGGGGSEIVLTQSPGTLSLSPGERATLSCRASSSVSSSYLHWYQQKPGQAPRLLIYSTSSRATGIPDRFSGSGSGTDFTLTISRLEPEDFAVYYCQQYSGYQFTFGQGTKLEIKGGGGSDKTHTCPPCPAPEAAGGPSVFLFPPKPKDTLMISRTPEVTCVVVDVSHEDPEVKFNWYVDGVEVHNAKTKPREEQYNSTYRVVSVLTVLHQDWLNGKEYKCKVSNKALGAPIEKTISKAKGQPREPQVYTLPPIRELMTSNQVSLSCAVKGFYPSDIAVEWESNGQPENNYKTTPPVLDSDGSFFLVSKLTVDKSRWQQGNVFSCSVMHEALHNHYTQKSLSLSPGK

SEQ ID NO: 225 - protein, 238 aa, synthetic construct; identical to SEQ ID NO: 52
  REGION 1..238: note = Ab0735 HC Knob Fc-6xHis

SEQ ID NO: 226 - protein, 5 aa, synthetic construct
  REGION 1..5: note = Ab0735 CDR H1
SYWMH

SEQ ID NO: 227 - protein, 17 aa, synthetic construct
  REGION 1..17: note = Ab0735 CDR H2
MIHPNSGGTNYAQKFQG

SEQ ID NO: 228 - protein, 8 aa, synthetic construct
  REGION 1..8: note = Ab0735 CDR H3
GDYVSRDY

SEQ ID NO: 229 - protein, 12 aa, synthetic construct
  REGION 1..12: note = Ab0735 CDR L1
RASSSVSSSYLH

SEQ ID NO: 230 - protein, 7 aa, synthetic construct
  REGION 1..7: note = Ab0735 CDR L2
STSSRAT

SEQ ID NO: 231 - protein, 9 aa, synthetic construct
  REGION 1..9: note = Ab0735 CDR L3
QQYSGYQFT

SEQ ID NO: 232 - protein, 472 aa, synthetic construct
  REGION 1..472: note = Ab0736 HC Hole scFv-Fc
EIVLTQSPGTLSLSPGERATLSCRASSSVSSSYLHWYQQKPGQAPRLLIYSTSSRATGIPDRFSGSGSGTDFTLTISRLEPEDFAVYYCQQYSGYQFTFGCGTKLEIKGGGGSGGGGSGGGGSQVQLVQSGAEVKKPGASVKVSCKASGYTFTSYWMHWVRQAPGQCLEWMGMIHPNSGGTNYAQKFQGRVTMTRDTSTSTVYMELSSLRSEDTAVYYCAMGDYVSRDYWGQGTLVTVSSGGGGSDKTHTCPPCPAPEAAGGPSVFLFPPKPKDTLMISRTPEVTCVVVDVSHEDPEVKFNWYVDGVEVHNAKTKPREEQYNSTYRVVSVLTVLHQDWLNGKEYKCKVSNKALGAPIEKTISKAKGQPREPQVYTLPPIRELMTSNQVSLSCAVKGFYPSDIAVEWESNGQPENNYKTTPPVLDSDGSFFLVSKLTVDKSRWQQGNVFSCSVMHEALHNHYTQKSLSLSPGK

SEQ ID NO: 233 - protein, 238 aa, synthetic construct; identical to SEQ ID NO: 52
  REGION 1..238: note = Ab0736 HC Knob Fc-6xHis

SEQ ID NO: 234 - protein, 5 aa, synthetic construct
  REGION 1..5: note = Ab0736 CDR H1
SYWMH

SEQ ID NO: 235 - protein, 17 aa, synthetic construct
  REGION 1..17: note = Ab0736 CDR H2
MIHPNSGGTNYAQKFQG

SEQ ID NO: 236 - protein, 8 aa, synthetic construct
  REGION 1..8: note = Ab0736 CDR H3
GDYVSRDY

SEQ ID NO: 237 - protein, 12 aa, synthetic construct
  REGION 1..12: note = Ab0736 CDR L1
RASSSVSSSYLH

SEQ ID NO: 238 - protein, 7 aa, synthetic construct
  REGION 1..7: note = Ab0736 CDR L2
STSSRAT

SEQ ID NO: 239 - protein, 9 aa, synthetic construct
  REGION 1..9: note = Ab0736 CDR L3
QQYSGYQFT

SEQ ID NO: 240 - protein, 472 aa, synthetic construct
  REGION 1..472: note = Ab0737 HC Hole scFv-Fc
EIVLTQSPGTLSLSPGERATLSCRASSSVSSSYLHWYQQKPGQAPRLLIYSTSSRATGIPDRFSGSGSGTDFTLTISRLEPEDFAVYYCQQYSGYQFTFGCGTKLEIKGGGGSGGGGSGGGGSQVQLVQSGAEVKKPGASVKVSCKASGYTFTSYWMHWVRQAPGQCLEWIGMIHPNSGGTNYAQKFQGRATLTRDTSTSTVYMELSSLRSEDTAVYYCAMGDYVSRDYWGQGTLVTVSSGGGGSDKTHTCPPCPAPEAAGGPSVFLFPPKPKDTLMISRTPEVTCVVVDVSHEDPEVKFNWYVDGVEVHNAKTKPREEQYNSTYRVVSVLTVLHQDWLNGKEYKCKVSNKALGAPIEKTISKAKGQPREPQVYTLPPIRELMTSNQVSLSCAVKGFYPSDIAVEWESNGQPENNYKTTPPVLDSDGSFFLVSKLTVDKSRWQQGNVFSCSVMHEALHNHYTQKSLSLSPGK

SEQ ID NO: 241 - protein, 238 aa, synthetic construct; identical to SEQ ID NO: 52
  REGION 1..238: note = Ab0737 HC Knob Fc-6xHis

SEQ ID NO: 242 - protein, 5 aa, synthetic construct
  REGION 1..5: note = Ab0737 CDR H1
SYWMH

SEQ ID NO: 243 - protein, 17 aa, synthetic construct
  REGION 1..17: note = Ab0737 CDR H2
MIHPNSGGTNYAQKFQG

SEQ ID NO: 244 - protein, 8 aa, synthetic construct
  REGION 1..8: note = Ab0737 CDR H3
GDYVSRDY

SEQ ID NO: 245 - protein, 12 aa, synthetic construct
  REGION 1..12: note = Ab0737 CDR L1
RASSSVSSSYLH

SEQ ID NO: 246 - protein, 7 aa, synthetic construct
  REGION 1..7: note = Ab0737 CDR L2
STSSRAT

SEQ ID NO: 247 - protein, 9 aa, synthetic construct
  REGION 1..9: note = Ab0737 CDR L3
QQYSGYQFT

SEQ ID NO: 248 - protein, 472 aa, synthetic construct
  REGION 1..472: note = Ab0738 HC Hole scFv-Fc
QVQLVQSGAEVKKPGASVKVSCKASGYTFTSYWMHWVRQAPGQGLEWMGMIHPNSGGTNYAQKFQGRVTMTRDTSTSTVYMELSSLRSEDTAVYYCAMGDYVSRDYWGQGTLVTVSSGGGGSGGGGSGGGGSEIVLTQSPGTLSLSPGERATLSCRASSSVSSSYLHWYQQKPGQAPRLLIYSTSNLASGIPDRFSGSGSGTDFTLTISRLEPEDFAVYYCQQYSGYQFTFGQGTKLEIKGGGGSDKTHTCPPCPAPEAAGGPSVFLFPPKPKDTLMISRTPEVTCVVVDVSHEDPEVKFNWYVDGVEVHNAKTKPREEQYNSTYRVVSVLTVLHQDWLNGKEYKCKVSNKALGAPIEKTISKAKGQPREPQVYTLPPIRELMTSNQVSLSCAVKGFYPSDIAVEWESNGQPENNYKTTPPVLDSDGSFFLVSKLTVDKSRWQQGNVFSCSVMHEALHNHYTQKSLSLSPGK

SEQ ID NO: 249 - protein, 238 aa, synthetic construct; identical to SEQ ID NO: 52
  REGION 1..238: note = Ab0738 HC Knob Fc-6xHis

SEQ ID NO: 250 - protein, 5 aa, synthetic construct
  REGION 1..5: note = Ab0738 CDR H1
SYWMH

SEQ ID NO: 251 - protein, 17 aa, synthetic construct
  REGION 1..17: note = Ab0738 CDR H2
MIHPNSGGTNYAQKFQG

SEQ ID NO: 252 - protein, 8 aa, synthetic construct
  REGION 1..8: note = Ab0738 CDR H3
GDYVSRDY

SEQ ID NO: 253 - protein, 12 aa, synthetic construct
  REGION 1..12: note = Ab0738 CDR L1
RASSSVSSSYLH

SEQ ID NO: 254 - protein, 7 aa, synthetic construct
  REGION 1..7: note = Ab0738 CDR L2
STSNLAS

SEQ ID NO: 255 - protein, 9 aa, synthetic construct
  REGION 1..9: note = Ab0738 CDR L3
QQYSGYQFT

SEQ ID NO: 256 - protein, 472 aa, synthetic construct
  REGION 1..472: note = Ab0739 HC Hole scFv-Fc
QVQLVQSGAEVKKPGASVKVSCKASGYTFTSYWMHWVRQAPGQGLEWMGMIHPNSGGTNYAQKFQGRVTMTRDTSTSTVYMELSSLRSEDTAVYYCAMGDYVSRDYWGQGTLVTVSSGGGGSGGGGSGGGGSEIVLTQSPGTLSLSPGERATLSCRASSSVSSSYLHWYQQKPGQAPRLLIYSTSNLASGVPARFSGSGSGTDFTLTISRLEPEDFAVYYCQQYSGYQFTFGQGTKLEIKGGGGSDKTHTCPPCPAPEAAGGPSVFLFPPKPKDTLMISRTPEVTCVVVDVSHEDPEVKFNWYVDGVEVHNAKTKPREEQYNSTYRVVSVLTVLHQDWLNGKEYKCKVSNKALGAPIEKTISKAKGQPREPQVYTLPPIRELMTSNQVSLSCAVKGFYPSDIAVEWESNGQPENNYKTTPPVLDSDGSFFLVSKLTVDKSRWQQGNVFSCSVMHEALHNHYTQKSLSLSPGK

SEQ ID NO: 257 - protein, 238 aa, synthetic construct; identical to SEQ ID NO: 52
  REGION 1..238: note = Ab0739 HC Knob Fc-6xHis

SEQ ID NO: 258 - protein, 5 aa, synthetic construct
  REGION 1..5: note = Ab0739 CDR H1
SYWMH

SEQ ID NO: 259 - protein, 17 aa, synthetic construct
  REGION 1..17: note = Ab0739 CDR H2
MIHPNSGGTNYAQKFQG

SEQ ID NO: 260 - protein, 8 aa, synthetic construct
  REGION 1..8: note = Ab0739 CDR H3
GDYVSRDY

SEQ ID NO: 261 - protein, 12 aa, synthetic construct
  REGION 1..12: note = Ab0739 CDR L1
RASSSVSSSYLH

SEQ ID NO: 262 - protein, 7 aa, synthetic construct
  REGION 1..7: note = Ab0739 CDR L2
STSNLAS

SEQ ID NO: 263 - protein, 9 aa, synthetic construct
  REGION 1..9: note = Ab0739 CDR L3
QQYSGYQFT

SEQ ID NO: 264 - protein, 472 aa, synthetic construct
  REGION 1..472: note = Ab0740 HC Hole scFv-Fc
QVQLVQSGAEVKKPGASVKVSCKASGYTFTSYWMHWVRQAPGQGLEWMGMIHPNSGGTNYAQKFQGRVTMTRDTSTSTVYMELSSLRSEDTAVYYCAMGDYVSRDYWGQGTLVTVSSGGGGSGGGGSGGGGSEIVLTQSPGTLSLSPGERATLSCRASSSVSSSYLHWYQQKPGQAPRLWIYSTSNLASGVPARFSGSGSGTDFTLTISRLEPEDFAVYYCQQYSGYQFTFGQGTKLEIKGGGGSDKTHTCPPCPAPEAAGGPSVFLFPPKPKDTLMISRTPEVTCVVVDVSHEDPEVKFNWYVDGVEVHNAKTKPREEQYNSTYRVVSVLTVLHQDWLNGKEYKCKVSNKALGAPIEKTISKAKGQPREPQVYTLPPIRELMTSNQVSLSCAVKGFYPSDIAVEWESNGQPENNYKTTPPVLDSDGSFFLVSKLTVDKSRWQQGNVFSCSVMHEALHNHYTQKSLSLSPGK

SEQ ID NO: 265 - protein, 238 aa, synthetic construct; identical to SEQ ID NO: 52
  REGION 1..238: note = Ab0740 HC Knob Fc-6xHis

SEQ ID NO: 266 - protein, 5 aa, synthetic construct
  REGION 1..5: note = Ab0740 CDR H1
SYWMH

SEQ ID NO: 267 - protein, 17 aa, synthetic construct
  REGION 1..17: note = Ab0740 CDR H2
MIHPNSGGTNYAQKFQG

SEQ ID NO: 268 - protein, 8 aa, synthetic construct
  REGION 1..8: note = Ab0740 CDR H3
GDYVSRDY

SEQ ID NO: 269 - protein, 12 aa, synthetic construct
  REGION 1..12: note = Ab0740 CDR L1
RASSSVSSSYLH

SEQ ID NO: 270 - protein, 7 aa, synthetic construct
  REGION 1..7: note = Ab0740 CDR L2
STSNLAS

SEQ ID NO: 271 - protein, 9 aa, synthetic construct
  REGION 1..9: note = Ab0740 CDR L3
QQYSGYQFT

SEQ ID NO: 272 - protein, 472 aa, synthetic construct
  REGION 1..472: note = Ab0741 HC Hole scFv-Fc
QVQLVQSGAEVKKPGASVKVSCKASGYTFTSYWMHWVRQAPGQGLEWIGMIHPNSGGTNYAQKFQGRATLTRDTSTSTVYMELSSLRSEDTAVYYCAMGDYVSRDYWGQGTLVTVSSGGGGSGGGGSGGGGSEIVLTQSPGTLSLSPGERATLSCRASSSVSSSYLHWYQQKPGQAPRLLIYSTSNLASGIPDRFSGSGSGTDFTLTISRLEPEDFAVYYCQQYSGYQFTFGQGTKLEIKGGGGSDKTHTCPPCPAPEAAGGPSVFLFPPKPKDTLMISRTPEVTCVVVDVSHEDPEVKFNWYVDGVEVHNAKTKPREEQYNSTYRVVSVLTVLHQDWLNGKEYKCKVSNKALGAPIEKTISKAKGQPREPQVYTLPPIRELMTSNQVSLSCAVKGFYPSDIAVEWESNGQPENNYKTTPPVLDSDGSFFLVSKLTVDKSRWQQGNVFSCSVMHEALHNHYTQKSLSLSPGK

SEQ ID NO: 273 - protein, 238 aa, synthetic construct; identical to SEQ ID NO: 52
  REGION 1..238: note = Ab0741 HCKnob Fc-6xHis

SEQ ID NO: 274 - protein, 5 aa, synthetic construct
  REGION 1..5: note = Ab0741 CDR H1
SYWMH

SEQ ID NO: 275 - protein, 17 aa, synthetic construct
  REGION 1..17: note = Ab0741 CDR H2
MIHPNSGGTNYAQKFQG

SEQ ID NO: 276 - protein, 8 aa, synthetic construct
  REGION 1..8: note = Ab0741 CDR H3
GDYVSRDY

SEQ ID NO: 277 - protein, 12 aa, synthetic construct
  REGION 1..12: note = Ab0741 CDR L1
RASSSVSSSYLH

SEQ ID NO: 278 - protein, 7 aa, synthetic construct
  REGION 1..7: note = Ab0741 CDR L2
STSNLAS

SEQ ID NO: 279 - protein, 9 aa, synthetic construct
  REGION 1..9: note = Ab0741 CDR L3
QQYSGYQFT

SEQ ID NO: 280 - protein, 472 aa, synthetic construct
  REGION 1..472: note = Ab0742 HC Hole scFv-Fc
QVQLVQSGAEVKKPGASVKVSCKASGYTFTSYWMHWVRQAPGQGLEWIGMIHPNSGGTNYAQKFQGRATLTRDTSTSTVYMELSSLRSEDTAVYYCAMGDYVSRDYWGQGTLVTVSSGGGGSGGGGSGGGGSEIVLTQSPGTLSLSPGERATLSCRASSSVSSSYLHWYQQKPGQAPRLLIYSTSNLASGVPARFSGSGSGTDFTLTISRLEPEDFAVYYCQQYSGYQFTFGQGTKLEIKGGGGSDKTHTCPPCPAPEAAGGPSVFLFPPKPKDTLMISRTPEVTCVVVDVSHEDPEVKFNWYVDGVEVHNAKTKPREEQYNSTYRVVSVLTVLHQDWLNGKEYKCKVSNKALGAPIEKTISKAKGQPREPQVYTLPPIRELMTSNQVSLSCAVKGFYPSDIAVEWESNGQPENNYKTTPPVLDSDGSFFLVSKLTVDKSRWQQGNVFSCSVMHEALHNHYTQKSLSLSPGK

SEQ ID NO: 281 - protein, 238 aa, synthetic construct; identical to SEQ ID NO: 52
  REGION 1..238: note = Ab0742 HC Knob Fc-6xHis

SEQ ID NO: 282 - protein, 5 aa, synthetic construct
  REGION 1..5: note = Ab0742 CDR H1
SYWMH

SEQ ID NO: 283 - protein, 17 aa, synthetic construct
  REGION 1..17: note = Ab0742 CDR H2
MIHPNSGGTNYAQKFQG

SEQ ID NO: 284 - protein, 8 aa, synthetic construct
  REGION 1..8: note = Ab0742 CDR H3
GDYVSRDY

SEQ ID NO: 285 - protein, 12 aa, synthetic construct
  REGION 1..12: note = Ab0742 CDR L1
RASSSVSSSYLH

SEQ ID NO: 286 - protein, 7 aa, synthetic construct
  REGION 1..7: note = Ab0742 CDR L2
STSNLAS

SEQ ID NO: 287 - protein, 9 aa, synthetic construct
  REGION 1..9: note = Ab0742 CDR L3
QQYSGYQFT

SEQ ID NO: 288 - protein, 472 aa, synthetic construct
  REGION 1..472: note = Ab0743 HC Hole scFv-Fc
QVQLVQSGAEVKKPGASVKVSCKASGYTFTSYWMHWVRQAPGQGLEWIGMIHPNSGGTNYAQKFQGRATLTRDTSTSTVYMELSSLRSEDTAVYYCAMGDYVSRDYWGQGTLVTVSSGGGGSGGGGSGGGGSEIVLTQSPGTLSLSPGERATLSCRASSSVSSSYLHWYQQKPGQAPRLWIYSTSNLASGVPARFSGSGSGTDFTLTISRLEPEDFAVYYCQQYSGYQFTFGQGTKLEIKGGGGSDKTHTCPPCPAPEAAGGPSVFLFPPKPKDTLMISRTPEVTCVVVDVSHEDPEVKFNWYVDGVEVHNAKTKPREEQYNSTYRVVSVLTVLHQDWLNGKEYKCKVSNKALGAPIEKTISKAKGQPREPQVYTLPPIRELMTSNQVSLSCAVKGFYPSDIAVEWESNGQPENNYKTTPPVLDSDGSFFLVSKLTVDKSRWQQGNVFSCSVMHEALHNHYTQKSLSLSPGK

SEQ ID NO: 289 - protein, 238 aa, synthetic construct; identical to SEQ ID NO: 52
  REGION 1..238: note = Ab0743 HC Knob Fc-6xHis

SEQ ID NO: 290 - protein, 5 aa, synthetic construct
  REGION 1..5: note = Ab0743 CDR H1
SYWMH

SEQ ID NO: 291 - protein, 17 aa, synthetic construct
  REGION 1..17: note = Ab0743 CDR H2
MIHPNSGGTNYAQKFQG

SEQ ID NO: 292 - protein, 8 aa, synthetic construct
  REGION 1..8: note = Ab0743 CDR H3
GDYVSRDY

SEQ ID NO: 293 - protein, 12 aa, synthetic construct
  REGION 1..12: note = Ab0743 CDR L1
RASSSVSSSYLH

SEQ ID NO: 294 - protein, 7 aa, synthetic construct
  REGION 1..7: note = Ab0743 CDR L2
STSNLAS

SEQ ID NO: 295 - protein, 9 aa, synthetic construct
  REGION 1..9: note = Ab0743 CDR L3
QQYSGYQFT

SEQ ID NO: 296 - protein, 472 aa, synthetic construct
  REGION 1..472: note = Ab0744 HC Hole scFv-Fc
EIVLTQSPGTLSLSPGERATLSCRASSSVSSSYLHWYQQKPGQAPRLLIYSTSNLASGIPDRFSGSGSGTDFTLTISRLEPEDFAVYYCQQYSGYQFTFGCGTKLEIKGGGGSGGGGSGGGGSQVQLVQSGAEVKKPGASVKVSCKASGYTFTSYWMHWVRQAPGQCLEWMGMIHPNSGGTNYAQKFQGRVTMTRDTSTSTVYMELSSLRSEDTAVYYCAMGDYVSRDYWGQGTLVTVSSGGGGSDKTHTCPPCPAPEAAGGPSVFLFPPKPKDTLMISRTPEVTCVVVDVSHEDPEVKFNWYVDGVEVHNAKTKPREEQYNSTYRVVSVLTVLHQDWLNGKEYKCKVSNKALGAPIEKTISKAKGQPREPQVYTLPPIRELMTSNQVSLSCAVKGFYPSDIAVEWESNGQPENNYKTTPPVLDSDGSFFLVSKLTVDKSRWQQGNVFSCSVMHEALHNHYTQKSLSLSPGK

SEQ ID NO: 297 - protein, 238 aa, synthetic construct; identical to SEQ ID NO: 52
  REGION 1..238: note = Ab0744 HC Knob Fc-6xHis

SEQ ID NO: 298 - protein, 5 aa, synthetic construct
  REGION 1..5: note = Ab0744 CDR H1
SYWMH

SEQ ID NO: 299 - protein, 17 aa, synthetic construct
  REGION 1..17: note = Ab0744 CDR H2
MIHPNSGGTNYAQKFQG

SEQ ID NO: 300 - protein, 8 aa, synthetic construct
  REGION 1..8: note = Ab0744 CDR H3
GDYVSRDY

SEQ ID NO: 301 - protein, 12 aa, synthetic construct
  REGION 1..12: note = Ab0744 CDR L1
RASSSVSSSYLH

SEQ ID NO: 302 - protein, 7 aa, synthetic construct
  REGION 1..7: note = Ab0744 CDR L2
STSNLAS

SEQ ID NO: 303 - protein, 9 aa, synthetic construct
  REGION 1..9: note = Ab0744 CDR L3
QQYSGYQFT

SEQ ID NO: 304 - protein, 472 aa, synthetic construct
  REGION 1..472: note = Ab0745 HC Hole scFv-Fc
EIVLTQSPGTLSLSPGERATLSCRASSSVSSSYLHWYQQKPGQAPRLLIYSTSNLASGVPARFSGSGSGTDFTLTISRLEPEDFAVYYCQQYSGYQFTFGCGTKLEIKGGGGSGGGGSGGGGSQVQLVQSGAEVKKPGASVKVSCKASGYTFTSYWMHWVRQAPGQCLEWMGMIHPNSGGTNYAQKFQGRVTMTRDTSTSTVYMELSSLRSEDTAVYYCAMGDYVSRDYWGQGTLVTVSSGGGGSDKTHTCPPCPAPEAAGGPSVFLFPPKPKDTLMISRTPEVTCVVVDVSHEDPEVKFNWYVDGVEVHNAKTKPREEQYNSTYRVVSVLTVLHQDWLNGKEYKCKVSNKALGAPIEKTISKAKGQPREPQVYTLPPIRELMTSNQVSLSCAVKGFYPSDIAVEWESNGQPENNYKTTPPVLDSDGSFFLVSKLTVDKSRWQQGNVFSCSVMHEALHNHYTQKSLSLSPGK

SEQ ID NO: 305 - protein, 238 aa, synthetic construct; identical to SEQ ID NO: 52
  REGION 1..238: note = Ab0745 HC Knob Fc-6xHis

SEQ ID NO: 306 - protein, 5 aa, synthetic construct
  REGION 1..5: note = Ab0745 CDR H1
SYWMH

SEQ ID NO: 307 - protein, 17 aa, synthetic construct
  REGION 1..17: note = Ab0745 CDR H2
MIHPNSGGTNYAQKFQG

SEQ ID NO: 308 - protein, 8 aa, synthetic construct
  REGION 1..8: note = Ab0745 CDR H3
GDYVSRDY

SEQ ID NO: 309 - protein, 12 aa, synthetic construct
  REGION 1..12: note = Ab0745 CDR L1
RASSSVSSSYLH

SEQ ID NO: 310 - protein, 7 aa, synthetic construct
  REGION 1..7: note = Ab0745 CDR L2
STSNLAS

SEQ ID NO: 311 - protein, 9 aa, synthetic construct
  REGION 1..9: note = Ab0745 CDR L3
QQYSGYQFT

SEQ ID NO: 312 - protein, 472 aa, synthetic construct
  REGION 1..472: note = Ab0746 HC Hole scFv-Fc
EIVLTQSPGTLSLSPGERATLSCRASSSVSSSYLHWYQQKPGQAPRLWIYSTSNLASGVPARFSGSGSGTDFTLTISRLEPEDFAVYYCQQYSGYQFTFGCGTKLEIKGGGGSGGGGSGGGGSQVQLVQSGAEVKKPGASVKVSCKASGYTFTSYWMHWVRQAPGQCLEWMGMIHPNSGGTNYAQKFQGRVTMTRDTSTSTVYMELSSLRSEDTAVYYCAMGDYVSRDYWGQGTLVTVSSGGGGSDKTHTCPPCPAPEAAGGPSVFLFPPKPKDTLMISRTPEVTCVVVDVSHEDPEVKFNWYVDGVEVHNAKTKPREEQYNSTYRVVSVLTVLHQDWLNGKEYKCKVSNKALGAPIEKTISKAKGQPREPQVYTLPPIRELMTSNQVSLSCAVKGFYPSDIAVEWESNGQPENNYKTTPPVLDSDGSFFLVSKLTVDKSRWQQGNVFSCSVMHEALHNHYTQKSLSLSPGK

SEQ ID NO: 313 - protein, 238 aa, synthetic construct; identical to SEQ ID NO: 52
  REGION 1..238: note = Ab0746 HC Knob Fc-6xHis

SEQ ID NO: 314 - protein, 5 aa, synthetic construct
  REGION 1..5: note = Ab0746 CDR H1
SYWMH

SEQ ID NO: 315 - protein, 17 aa, synthetic construct
  REGION 1..17: note = Ab0746 CDR H2
MIHPNSGGTNYAQKFQG

SEQ ID NO: 316 - protein, 8 aa, synthetic construct
  REGION 1..8: note = Ab0746 CDR H3
GDYVSRDY

SEQ ID NO: 317 - protein, 12 aa, synthetic construct
  REGION 1..12: note = Ab0746 CDR L1
RASSSVSSSYLH

SEQ ID NO: 318 - protein, 7 aa, synthetic construct
  REGION 1..7: note = Ab0746 CDR L2
STSNLAS

SEQ ID NO: 319 - protein, 9 aa, synthetic construct
  REGION 1..9: note = Ab0746 CDR L3
QQYSGYQFT

SEQ ID NO: 320 - protein, 472 aa, synthetic construct
  REGION 1..472: note = Ab0747 HC Hole scFv-Fc
EIVLTQSPGTLSLSPGERATLSCRASSSVSSSYLHWYQQKPGQAPRLLIYSTSNLASGIPDRFSGSGSGTDFTLTISRLEPEDFAVYYCQQYSGYQFTFGCGTKLEIKGGGGSGGGGSGGGGSQVQLVQSGAEVKKPGASVKVSCKASGYTFTSYWMHWVRQAPGQCLEWIGMIHPNSGGTNYAQKFQGRATLTRDTSTSTVYMELSSLRSEDTAVYYCAMGDYVSRDYWGQGTLVTVSSGGGGSDKTHTCPPCPAPEAAGGPSVFLFPPKPKDTLMISRTPEVTCVVVDVSHEDPEVKFNWYVDGVEVHNAKTKPREEQYNSTYRVVSVLTVLHQDWLNGKEYKCKVSNKALGAPIEKTISKAKGQPREPQVYTLPPIRELMTSNQVSLSCAVKGFYPSDIAVEWESNGQPENNYKTTPPVLDSDGSFFLVSKLTVDKSRWQQGNVFSCSVMHEALHNHYTQKSLSLSPGK

SEQ ID NO: 321 - protein, 238 aa, synthetic construct; identical to SEQ ID NO: 52
  REGION 1..238: note = Ab0747 HC Knob Fc-6xHis

SEQ ID NO: 322 - protein, 5 aa, synthetic construct
  REGION 1..5: note = Ab0747 CDR H1
SYWMH

SEQ ID NO: 323 - protein, 17 aa, synthetic construct
  REGION 1..17: note = Ab0747 CDR H2
MIHPNSGGTNYAQKFQG

SEQ ID NO: 324 - protein, 8 aa, synthetic construct
  REGION 1..8: note = Ab0747 CDR H3
GDYVSRDY

SEQ ID NO: 325 - protein, 12 aa, synthetic construct
  REGION 1..12: note = Ab0747 CDR L1
RASSSVSSSYLH

SEQ ID NO: 326 - protein, 7 aa, synthetic construct
  REGION 1..7: note = Ab0747 CDR L2
STSNLAS

SEQ ID NO: 327 - protein, 9 aa, synthetic construct
  REGION 1..9: note = Ab0747 CDR L3
QQYSGYQFT

SEQ ID NO: 328 - protein, 472 aa, synthetic construct
  REGION 1..472: note = Ab0748 HC Hole scFv-Fc
EIVLTQSPGTLSLSPGERATLSCRASSSVSSSYLHWYQQKPGQAPRLLIYSTSNLASGVPARFSGSGSGTDFTLTISRLEPEDFAVYYCQQYSGYQFTFGCGTKLEIKGGGGSGGGGSGGGGSQVQLVQSGAEVKKPGASVKVSCKASGYTFTSYWMHWVRQAPGQCLEWIGMIHPNSGGTNYAQKFQGRATLTRDTSTSTVYMELSSLRSEDTAVYYCAMGDYVSRDYWGQGTLVTVSSGGGGSDKTHTCPPCPAPEAAGGPSVFLFPPKPKDTLMISRTPEVTCVVVDVSHEDPEVKFNWYVDGVEVHNAKTKPREEQYNSTYRVVSVLTVLHQDWLNGKEYKCKVSNKALGAPIEKTISKAKGQPREPQVYTLPPIRELMTSNQVSLSCAVKGFYPSDIAVEWESNGQPENNYKTTPPVLDSDGSFFLVSKLTVDKSRWQQGNVFSCSVMHEALHNHYTQKSLSLSPGK

SEQ ID NO: 329 - protein, 238 aa, synthetic construct; identical to SEQ ID NO: 52
  REGION 1..238: note = Ab0748 HC Knob Fc-6xHis

SEQ ID NO: 330 - protein, 5 aa, synthetic construct
  REGION 1..5: note = Ab0748 CDR H1
SYWMH

SEQ ID NO: 331 - protein, 17 aa, synthetic construct
  REGION 1..17: note = Ab0748 CDR H2
MIHPNSGGTNYAQKFQG

SEQ ID NO: 332 - protein, 8 aa, synthetic construct
  REGION 1..8: note = Ab0748 CDR H3
GDYVSRDY

SEQ ID NO: 333 - protein, 12 aa, synthetic construct
  REGION 1..12: note = Ab0748 CDR L1
RASSSVSSSYLH

SEQ ID NO: 334 - protein, 7 aa, synthetic construct
  REGION 1..7: note = Ab0748 CDR L2
STSNLAS

SEQ ID NO: 335 - protein, 9 aa, synthetic construct
  REGION 1..9: note = Ab0748 CDR L3
QQYSGYQFT

SEQ ID NO: 336 - protein, 472 aa, synthetic construct
  REGION 1..472: note = Ab0749 HC Hole scFv-Fc
EIVLTQSPGTLSLSPGERATLSCRASSSVSSSYLHWYQQKPGQAPRLWIYSTSNLASGVPARFSGSGSGTDFTLTISRLEPEDFAVYYCQQYSGYQFTFGCGTKLEIKGGGGSGGGGSGGGGSQVQLVQSGAEVKKPGASVKVSCKASGYTFTSYWMHWVRQAPGQCLEWIGMIHPNSGGTNYAQKFQGRATLTRDTSTSTVYMELSSLRSEDTAVYYCAMGDYVSRDYWGQGTLVTVSSGGGGSDKTHTCPPCPAPEAAGGPSVFLFPPKPKDTLMISRTPEVTCVVVDVSHEDPEVKFNWYVDGVEVHNAKTKPREEQYNSTYRVVSVLTVLHQDWLNGKEYKCKVSNKALGAPIEKTISKAKGQPREPQVYTLPPIRELMTSNQVSLSCAVKGFYPSDIAVEWESNGQPENNYKTTPPVLDSDGSFFLVSKLTVDKSRWQQGNVFSCSVMHEALHNHYTQKSLSLSPGK

SEQ ID NO: 337 - protein, 238 aa, synthetic construct; identical to SEQ ID NO: 52
  REGION 1..238: note = Ab0749 HC Knob Fc-6xHis

SEQ ID NO: 338 - protein, 5 aa, synthetic construct
  REGION 1..5: note = Ab0749 CDR H1
SYWMH

SEQ ID NO: 339 - protein, 17 aa, synthetic construct
  REGION 1..17: note = Ab0749 CDR H2
MIHPNSGGTNYAQKFQG

SEQ ID NO: 340 - protein, 8 aa, synthetic construct
  REGION 1..8: note = Ab0749 CDR H3
GDYVSRDY

SEQ ID NO: 341 - protein, 12 aa, synthetic construct
  REGION 1..12: note = Ab0749 CDR L1
RASSSVSSSYLH

SEQ ID NO: 342 - protein, 7 aa, synthetic construct
  REGION 1..7: note = Ab0749 CDR L2
STSNLAS

SEQ ID NO: 343 - protein, 9 aa, synthetic construct
  REGION 1..9: note = Ab0749 CDR L3
QQYSGYQFT

SEQ ID NO: 344 - protein, 472 aa, synthetic construct
  REGION 1..472: note = Ab0750 HC Hole scFv-Fc
QVQLVQSGAEVKKPGASVKVSCKASGYTFTSYWMHWVRQAPGQGLEWIGIIHPNSGGTSYAQKFQGRVTMTRDTSTSTVYMELSSLRSEDTAVYYCAMGDYVSRDYWGQGTLVTVSSGGGGSGGGGSGGGGSEIVLTQSPGTLSLSPGERATLSCRASSSVSSSYLHWYQQKPGQAPRLLIYSTSSRATGIPDRFSGSGSGTDFTLTISRLEPEDFAVYYCQQYSGYQFTFGQGTKLEIKGGGGSDKTHTCPPCPAPEAAGGPSVFLFPPKPKDTLMISRTPEVTCVVVDVSHEDPEVKFNWYVDGVEVHNAKTKPREEQYNSTYRVVSVLTVLHQDWLNGKEYKCKVSNKALGAPIEKTISKAKGQPREPQVYTLPPIRELMTSNQVSLSCAVKGFYPSDIAVEWESNGQPENNYKTTPPVLDSDGSFFLVSKLTVDKSRWQQGNVFSCSVMHEALHNHYTQKSLSLSPGK

SEQ ID NO: 345 - protein, 238 aa, synthetic construct; identical to SEQ ID NO: 52
  REGION 1..238: note = Ab0750 HC Knob Fc-6xHis

SEQ ID NO: 346 - protein, 5 aa, synthetic construct
  REGION 1..5: note = Ab0750 CDR H1
SYWMH

SEQ ID NO: 347 - protein, 17 aa, synthetic construct
  REGION 1..17: note = Ab0750 CDR H2
IIHPNSGGTSYAQKFQG

SEQ ID NO: 348 - protein, 8 aa, synthetic construct
  REGION 1..8: note = Ab0750 CDR H3
GDYVSRDY

SEQ ID NO: 349 - protein, 12 aa, synthetic construct
  REGION 1..12: note = Ab0750 CDR L1
RASSSVSSSYLH

SEQ ID NO: 350 - protein, 7 aa, synthetic construct
  REGION 1..7: note = Ab0750 CDR L2
STSSRAT

SEQ ID NO: 351 - protein, 9 aa, synthetic construct
  REGION 1..9: note = Ab0750 CDR L3
QQYSGYQFT

SEQ ID NO: 352 - protein, 472 aa, synthetic construct
  REGION 1..472: note = Ab0751 HC Hole scFv-Fc
QVQLVQSGAEVKKPGASVKVSCKASGYTFTSYWMHWVRQAPGQGLEWMGIIHPNSGGTSYAQKFQGRATLTRDTSTSTVYMELSSLRSEDTAVYYCAMGDYVSRDYWGQGTLVTVSSGGGGSGGGGSGGGGSEIVLTQSPGTLSLSPGERATLSCRASSSVSSSYLHWYQQKPGQAPRLLIYSTSSRATGIPDRFSGSGSGTDFTLTISRLEPEDFAVYYCQQYSGYQFTFGQGTKLEIKGGGGSDKTHTCPPCPAPEAAGGPSVFLFPPKPKDTLMISRTPEVTCVVVDVSHEDPEVKFNWYVDGVEVHNAKTKPREEQYNSTYRVVSVLTVLHQDWLNGKEYKCKVSNKALGAPIEKTISKAKGQPREPQVYTLPPIRELMTSNQVSLSCAVKGFYPSDIAVEWESNGQPENNYKTTPPVLDSDGSFFLVSKLTVDKSRWQQGNVFSCSVMHEALHNHYTQKSLSLSPGK

SEQ ID NO: 353 - protein, 238 aa, synthetic construct; identical to SEQ ID NO: 52
  REGION 1..238: note = Ab0751 HC Knob Fc-6xHis

SEQ ID NO: 354 - protein, 5 aa, synthetic construct
  REGION 1..5: note = Ab0751 CDR H1
SYWMH

SEQ ID NO: 355 - protein, 17 aa, synthetic construct
  REGION 1..17: note = Ab0751 CDR H2
IIHPNSGGTSYAQKFQG

SEQ ID NO: 356 - protein, 8 aa, synthetic construct
  REGION 1..8: note = Ab0751 CDR H3
GDYVSRDY

SEQ ID NO: 357 - protein, 12 aa, synthetic construct
  REGION 1..12: note = Ab0751 CDR L1
RASSSVSSSYLH

SEQ ID NO: 358 - protein, 7 aa, synthetic construct
  REGION 1..7: note = Ab0751 CDR L2
STSSRAT

SEQ ID NO: 359 - protein, 9 aa, synthetic construct
  REGION 1..9: note = Ab0751 CDR L3
QQYSGYQFT

SEQ ID NO: 360 - protein, 472 aa, synthetic construct
  REGION 1..472: note = Ab0752 HC Hole scFv-Fc
QVQLVQSGAEVKKPGASVKVSCKASGYTFTSYWMHWVRQAPGQGLEWIGIIHPNSGGTSYAQKFQGRATLTRDTSTSTVYMELSSLRSEDTAVYYCAMGDYVSRDYWGQGTLVTVSSGGGGSGGGGSGGGGSEIVLTQSPGTLSLSPGERATLSCRASSSVSSSYLHWYQQKPGQAPRLLIYSTSSRATGIPDRFSGSGSGTDFTLTISRLEPEDFAVYYCQQYSGYQFTFGQGTKLEIKGGGGSDKTHTCPPCPAPEAAGGPSVFLFPPKPKDTLMISRTPEVTCVVVDVSHEDPEVKFNWYVDGVEVHNAKTKPREEQYNSTYRVVSVLTVLHQDWLNGKEYKCKVSNKALGAPIEKTISKAKGQPREPQVYTLPPIRELMTSNQVSLSCAVKGFYPSDIAVEWESNGQPENNYKTTPPVLDSDGSFFLVSKLTVDKSRWQQGNVFSCSVMHEALHNHYTQKSLSLSPGK

SEQ ID NO: 361 - protein, 238 aa, synthetic construct; identical to SEQ ID NO: 52
  REGION 1..238: note = Ab0752 HC Knob Fc-6xHis

SEQ ID NO: 362 - protein, 5 aa, synthetic construct
  REGION 1..5: note = Ab0752 CDR H1
SYWMH

SEQ ID NO: 363 - protein, 17 aa, synthetic construct
  REGION 1..17: note = Ab0752 CDR H2
IIHPNSGGTSYAQKFQG

SEQ ID NO: 364 - protein, 8 aa, synthetic construct
  REGION 1..8: note = Ab0752 CDR H3
GDYVSRDY

SEQ ID NO: 365 - protein, 12 aa, synthetic construct
  REGION 1..12: note = Ab0752 CDR L1
RASSSVSSSYLH

SEQ ID NO: 366 - protein, 7 aa, synthetic construct
  REGION 1..7: note = Ab0752 CDR L2
STSSRAT

SEQ ID NO: 367 - protein, 9 aa, synthetic construct
  REGION 1..9: note = Ab0752 CDR L3
QQYSGYQFT

SEQ ID NO: 368 - protein, 472 aa, synthetic construct
  REGION 1..472: note = Ab0753 HC Hole scFv-Fc
QVQLVQSGAEVKKPGASVKVSCKASGYTFTSYWMHWVRQAPGQGLEWMGIIHPNSGGTSYAQKFQGRVTMTVDTSTSTVYMELSSLRSEDTAVYYCAMGDYVSRDYWGQGTLVTVSSGGGGSGGGGSGGGGSEIVLTQSPGTLSLSPGERATLSCRASSSVSSSYLHWYQQKPGQAPRLLIYSTSSRATGIPDRFSGSGSGTDFTLTISRLEPEDFAVYYCQQYSGYQFTFGQGTKLEIKGGGGSDKTHTCPPCPAPEAAGGPSVFLFPPKPKDTLMISRTPEVTCVVVDVSHEDPEVKFNWYVDGVEVHNAKTKPREEQYNSTYRVVSVLTVLHQDWLNGKEYKCKVSNKALGAPIEKTISKAKGQPREPQVYTLPPIRELMTSNQVSLSCAVKGFYPSDIAVEWESNGQPENNYKTTPPVLDSDGSFFLVSKLTVDKSRWQQGNVFSCSVMHEALHNHYTQKSLSLSPGK

SEQ ID NO: 369 - protein, 238 aa, synthetic construct; identical to SEQ ID NO: 52
  REGION 1..238: note = Ab0752 HC Knob Fc-6xHis

SEQ ID NO: 370 - protein, 5 aa, synthetic construct
  REGION 1..5: note = Ab0753 CDR H1
SYWMH

SEQ ID NO: 371 - protein, 17 aa, synthetic construct
  REGION 1..17: note = Ab0753 CDR H2
IIHPNSGGTSYAQKFQG

SEQ ID NO: 372 - protein, 8 aa, synthetic construct
  REGION 1..8: note = Ab0753 CDR H3
GDYVSRDY

SEQ ID NO: 373 - protein, 12 aa, synthetic construct
  REGION 1..12: note = Ab0753 CDR L1
RASSSVSSSYLH

SEQ ID NO: 374 - protein, 7 aa, synthetic construct
  REGION 1..7: note = Ab0753 CDR L2
STSSRAT

SEQ ID NO: 375 - protein, 9 aa, synthetic construct
  REGION 1..9: note = Ab0753 CDR L3
QQYSGYQFT

SEQ ID NO: 376 - protein, 472 aa, synthetic construct
  REGION 1..472: note = Ab0754 HC Hole scFv-Fc
QVQLVQSGAEVKKPGASVKVSCKASGYTFTSYWMHWVRQAPGQGLEWMGIIHPNSGGTSYAQKFQGRVTMTVDKSTSTVYMELSSLRSEDTAVYYCAMGDYVSRDYWGQGTLVTVSSGGGGSGGGGSGGGGSEIVLTQSPGTLSLSPGERATLSCRASSSVSSSYLHWYQQKPGQAPRLLIYSTSSRATGIPDRFSGSGSGTDFTLTISRLEPEDFAVYYCQQYSGYQFTFGQGTKLEIKGGGGSDKTHTCPPCPAPEAAGGPSVFLFPPKPKDTLMISRTPEVTCVVVDVSHEDPEVKFNWYVDGVEVHNAKTKPREEQYNSTYRVVSVLTVLHQDWLNGKEYKCKVSNKALGAPIEKTISKAKGQPREPQVYTLPPIRELMTSNQVSLSCAVKGFYPSDIAVEWESNGQPENNYKTTPPVLDSDGSFFLVSKLTVDKSRWQQGNVFSCSVMHEALHNHYTQKSLSLSPGK

SEQ ID NO: 377 - protein, 238 aa, synthetic construct; identical to SEQ ID NO: 52
  REGION 1..238: note = Ab0754 HC Knob Fc-6xHis

SEQ ID NO: 378 - protein, 5 aa, synthetic construct
  REGION 1..5: note = Ab0754 CDR H1
SYWMH

SEQ ID NO: 379 - protein, 17 aa, synthetic construct
  REGION 1..17: note = Ab0754 CDR H2
IIHPNSGGTSYAQKFQG

SEQ ID NO: 380 - protein, 8 aa, synthetic construct
  REGION 1..8: note = Ab0754 CDR H3
GDYVSRDY

SEQ ID NO: 381 - protein, 12 aa, synthetic construct
  REGION 1..12: note = Ab0754 CDR L1
RASSSVSSSYLH

SEQ ID NO: 382 - protein, 7 aa, synthetic construct
  REGION 1..7: note = Ab0754 CDR L2
STSSRAT

SEQ ID NO: 383 - protein, 9 aa, synthetic construct
  REGION 1..9: note = Ab0754 CDR L3
QQYSGYQFT

SEQ ID NO: 384 - protein, 472 aa, synthetic construct
  REGION 1..472: note = Ab0755 HC Hole scFv-Fc
QVQLVQSGAEVKKPGASVKVSCKASGYTFTSYWMHWVRQAPGQGLEWMGIIHPNSGGTSYAQKFQGRVTMTVDKSTSTAYMELSSLRSEDTAVYYCAMGDYVSRDYWGQGTLVTVSSGGGGSGGGGSGGGGSEIVLTQSPGTLSLSPGERATLSCRASSSVSSSYLHWYQQKPGQAPRLLIYSTSSRATGIPDRFSGSGSGTDFTLTISRLEPEDFAVYYCQQYSGYQFTFGQGTKLEIKGGGGSDKTHTCPPCPAPEAAGGPSVFLFPPKPKDTLMISRTPEVTCVVVDVSHEDPEVKFNWYVDGVEVHNAKTKPREEQYNSTYRVVSVLTVLHQDWLNGKEYKCKVSNKALGAPIEKTISKAKGQPREPQVYTLPPIRELMTSNQVSLSCAVKGFYPSDIAVEWESNGQPENNYKTTPPVLDSDGSFFLVSKLTVDKSRWQQGNVFSCSVMHEALHNHYTQKSLSLSPGK

SEQ ID NO: 385 - protein, 238 aa, synthetic construct; identical to SEQ ID NO: 52
  REGION 1..238: note = Ab0755 HC Knob Fc-6xHis

SEQ ID NO: 386 - protein, 5 aa, synthetic construct
  REGION 1..5: note = Ab0755 CDR H1
SYWMH

SEQ ID NO: 387 - protein, 17 aa, synthetic construct
  REGION 1..17: note = Ab0755 CDR H2
IIHPNSGGTSYAQKFQG

SEQ ID NO: 388 - protein, 8 aa, synthetic construct
  REGION 1..8: note = Ab0755 CDR H3
GDYVSRDY

SEQ ID NO: 389 - protein, 12 aa, synthetic construct
  REGION 1..12: note = Ab0755 CDR L1
RASSSVSSSYLH

SEQ ID NO: 390 - protein, 7 aa, synthetic construct
  REGION 1..7: note = Ab0755 CDR L2
STSSRAT

SEQ ID NO: 391 - protein, 9 aa, synthetic construct
  REGION 1..9: note = Ab0755 CDR L3
QQYSGYQFT

SEQ ID NO: 392 - protein, 472 aa, synthetic construct
  REGION 1..472: note = Ab0756 HC Hole scFv-Fc
QVQLVQSGAEVKKPGASVKVSCKASGYTFTSYWMHWVRQAPGQGLEWIGIIHPNSGGTSYAQKFQGRATLTVDKSTSTVYMELSSLRSEDTAVYYCAMGDYVSRDYWGQGTLVTVSSGGGGSGGGGSGGGGSEIVLTQSPGTLSLSPGERATLSCRASSSVSSSYLHWYQQKPGQAPRLLIYSTSSRATGIPDRFSGSGSGTDFTLTISRLEPEDFAVYYCQQYSGYQFTFGQGTKLEIKGGGGSDKTHTCPPCPAPEAAGGPSVFLFPPKPKDTLMISRTPEVTCVVVDVSHEDPEVKFNWYVDGVEVHNAKTKPREEQYNSTYRVVSVLTVLHQDWLNGKEYKCKVSNKALGAPIEKTISKAKGQPREPQVYTLPPIRELMTSNQVSLSCAVKGFYPSDIAVEWESNGQPENNYKTTPPVLDSDGSFFLVSKLTVDKSRWQQGNVFSCSVMHEALHNHYTQKSLSLSPGK

SEQ ID NO: 393 - protein, 238 aa, synthetic construct; identical to SEQ ID NO: 52
  REGION 1..238: note = Ab0756 HC Knob Fc-6xHis

SEQ ID NO: 394 - protein, 5 aa, synthetic construct
  REGION 1..5: note = Ab0756 CDR H1
SYWMH

SEQ ID NO: 395 - protein, 17 aa, synthetic construct
  REGION 1..17: note = Ab0756 CDR H2
IIHPNSGGTSYAQKFQG

SEQ ID NO: 396 - protein, 8 aa, synthetic construct
  REGION 1..8: note = Ab0756 CDR H3
GDYVSRDY

SEQ ID NO: 397 - protein, 12 aa, synthetic construct
  REGION 1..12: note = Ab0756 CDR L1
RASSSVSSSYLH

SEQ ID NO: 398 - protein, 7 aa, synthetic construct
  REGION 1..7: note = Ab0756 CDR L2
STSSRAT

SEQ ID NO: 399 - protein, 9 aa, synthetic construct
  REGION 1..9: note = Ab0756 CDR L3
QQYSGYQFT

SEQ ID NO: 400 - protein, 472 aa, synthetic construct
  REGION 1..472: note = Ab0757 HC Hole scFv-Fc
QVQLVQSGAEVKKPGASVKVSCKASGYTFTSYWMHWVRQAPGQGLEWIGIIHPNSGGTSYAQKFQGRATLTVDKSTSTAYMELSSLRSEDTAVYYCAMGDYVSRDYWGQGTLVTVSSGGGGSGGGGSGGGGSEIVLTQSPGTLSLSPGERATLSCRASSSVSSSYLHWYQQKPGQAPRLLIYSTSSRATGIPDRFSGSGSGTDFTLTISRLEPEDFAVYYCQQYSGYQFTFGQGTKLEIKGGGGSDKTHTCPPCPAPEAAGGPSVFLFPPKPKDTLMISRTPEVTCVVVDVSHEDPEVKFNWYVDGVEVHNAKTKPREEQYNSTYRVVSVLTVLHQDWLNGKEYKCKVSNKALGAPIEKTISKAKGQPREPQVYTLPPIRELMTSNQVSLSCAVKGFYPSDIAVEWESNGQPENNYKTTPPVLDSDGSFFLVSKLTVDKSRWQQGNVFSCSVMHEALHNHYTQKSLSLSPGK

SEQ ID NO: 401 - protein, 238 aa, synthetic construct; identical to SEQ ID NO: 52
  REGION 1..238: note = Ab0757 HC Knob Fc-6xHis

SEQ ID NO: 402 - protein, 5 aa, synthetic construct
  REGION 1..5: note = Ab0757 CDR H1
SYWMH

SEQ ID NO: 403 - protein, 17 aa, synthetic construct
  REGION 1..17: note = Ab0757 CDR H2
IIHPNSGGTSYAQKFQG

SEQ ID NO: 404 - protein, 8 aa, synthetic construct
  REGION 1..8: note = Ab0757 CDR H3
GDYVSRDY

SEQ ID NO: 405 - protein, 12 aa, synthetic construct
  REGION 1..12: note = Ab0757 CDR L1
RASSSVSSSYLH

SEQ ID NO: 406 - protein, 7 aa, synthetic construct
  REGION 1..7: note = Ab0757 CDR L2
STSSRAT

SEQ ID NO: 407 - protein, 9 aa, synthetic construct
  REGION 1..9: note = Ab0757 CDR L3
QQYSGYQFT

SEQ ID NO: 408 - protein, 472 aa, synthetic construct
  REGION 1..472: note = Ab0758 HC Hole scFv-Fc
QVQLVQSGAEVKKPGASVKVSCKASGYTFTSYWMHWVRQRPGQGLEWMGIIHPNSGGTSYAQKFQGRVTMTRDTSTSTVYMELSSLRSEDTAVYYCAMGDYVSRDYWGQGTLVTVSSGGGGSGGGGSGGGGSEIVLTQSPGTLSLSPGERATLSCRASSSVSSSYLHWYQQKPGQAPRLLIYSTSSRATGIPDRFSGSGSGTDFTLTISRLEPEDFAVYYCQQYSGYQFTFGQGTKLEIKGGGGSDKTHTCPPCPAPEAAGGPSVFLFPPKPKDTLMISRTPEVTCVVVDVSHEDPEVKFNWYVDGVEVHNAKTKPREEQYNSTYRVVSVLTVLHQDWLNGKEYKCKVSNKALGAPIEKTISKAKGQPREPQVYTLPPIRELMTSNQVSLSCAVKGFYPSDIAVEWESNGQPENNYKTTPPVLDSDGSFFLVSKLTVDKSRWQQGNVFSCSVMHEALHNHYTQKSLSLSPGK

SEQ ID NO: 409 - protein, 238 aa, synthetic construct; identical to SEQ ID NO: 52
  REGION 1..238: note = Ab0758 HC Knob Fc-6xHis

SEQ ID NO: 410 - protein, 5 aa, synthetic construct
  REGION 1..5: note = AB0758 CDR H1
SYWMH

SEQ ID NO: 411 - protein, 17 aa, synthetic construct
  REGION 1..17: note = Ab0758 CDR H2
IIHPNSGGTSYAQKFQG

SEQ ID NO: 412 - protein, 8 aa, synthetic construct
  REGION 1..8: note = Ab0758 CDR H3
GDYVSRDY

SEQ ID NO: 413 - protein, 12 aa, synthetic construct
  REGION 1..12: note = Ab0758 CDR L1
RASSSVSSSYLH

SEQ ID NO: 414 - protein, 7 aa, synthetic construct
  REGION 1..7: note = Ab0758 CDR L2
STSSRAT

SEQ ID NO: 415 - protein, 9 aa, synthetic construct
  REGION 1..9: note = Ab0758 CDR L3
QQYSGYQFT

SEQ ID NO: 416 - protein, 472 aa, synthetic construct
  REGION 1..472: note = Ab0759 HC Hole scFv-Fc
QVQLVQSGAEVKKPGASVKVSCKASGYTFTSYWMHWVRQHPGQGLEWMGIIHPNSGGTSYAQKFQGRVTMTRDTSTSTVYMELSSLRSEDTAVYYCAMGDYVSRDYWGQGTLVTVSSGGGGSGGGGSGGGGSEIVLTQSPGTLSLSPGERATLSCRASSSVSSSYLHWYQQKPGQAPRLLIYSTSSRATGIPDRFSGSGSGTDFTLTISRLEPEDFAVYYCQQYSGYQFTFGQGTKLEIKGGGGSDKTHTCPPCPAPEAAGGPSVFLFPPKPKDTLMISRTPEVTCVVVDVSHEDPEVKFNWYVDGVEVHNAKTKPREEQYNSTYRVVSVLTVLHQDWLNGKEYKCKVSNKALGAPIEKTISKAKGQPREPQVYTLPPIRELMTSNQVSLSCAVKGFYPSDIAVEWESNGQPENNYKTTPPVLDSDGSFFLVSKLTVDKSRWQQGNVFSCSVMHEALHNHYTQKSLSLSPGK

SEQ ID NO: 417 - protein, 238 aa, synthetic construct; identical to SEQ ID NO: 52
  REGION 1..238: note = Ab0759 HC Knob Fc-6xHis

SEQ ID NO: 418 - protein, 5 aa, synthetic construct
  REGION 1..5: note = Ab0759 CDR H1
SYWMH

SEQ ID NO: 419 - protein, 17 aa, synthetic construct
  REGION 1..17: note = Ab0759 CDR H2
IIHPNSGGTSYAQKFQG

SEQ ID NO: 420 - protein, 8 aa, synthetic construct
  REGION 1..8: note = Ab0759 CDR H3
GDYVSRDY

SEQ ID NO: 421 - protein, 12 aa, synthetic construct
  REGION 1..12: note = Ab0759 CDR L1
RASSSVSSSYLH

SEQ ID NO: 422 - protein, 7 aa, synthetic construct
  REGION 1..7: note = Ab0759 CDR L2
STSSRAT

SEQ ID NO: 423 - protein, 9 aa, synthetic construct
  REGION 1..9: note = Ab0759 CDR L3
QQYSGYQFT

SEQ ID NO: 424 - protein, 472 aa, synthetic construct
  REGION 1..472: note = Ab0760 HC Hole scFv-Fc
QVQLVQSGAEVKKPGASVKVSCKASGYTFTSYWMHWVRQAPGQGLEWMGIIHPNSGGTSYAQKFQGRVTMTRDTSTSTVYMELSSLRSEDTAVYYCAMGDYVSRDYWGQGTLVTVSSGGGGSGGGGSGGGGSEIVLTQSPGTLSLSPGERATLSCRASSSVSSSYLHWYQQKPGQAPRLLIYSTSSRATGIPDRFSGSGSGTDFTLTIHRLEPEDFAVYYCQQYSGYQFTFGQGTKLEIKGGGGSDKTHTCPPCPAPEAAGGPSVFLFPPKPKDTLMISRTPEVTCVVVDVSHEDPEVKFNWYVDGVEVHNAKTKPREEQYNSTYRVVSVLTVLHQDWLNGKEYKCKVSNKALGAPIEKTISKAKGQPREPQVYTLPPIRELMTSNQVSLSCAVKGFYPSDIAVEWESNGQPENNYKTTPPVLDSDGSFFLVSKLTVDKSRWQQGNVFSCSVMHEALHNHYTQKSLSLSPGK

SEQ ID NO: 425 - protein, 238 aa, synthetic construct; identical to SEQ ID NO: 52
  REGION 1..238: note = Ab0760 HC Knob Fc-6xHis

SEQ ID NO: 426 - protein, 5 aa, synthetic construct
  REGION 1..5: note = Ab0760 CDR H1
SYWMH

SEQ ID NO: 427 - protein, 17 aa, synthetic construct
  REGION 1..17: note = Ab0760 CDR H2
IIHPNSGGTSYAQKFQG

SEQ ID NO: 428 - protein, 8 aa, synthetic construct
  REGION 1..8: note = Ab0760 CDR H3
GDYVSRDY

SEQ ID NO: 429 - protein, 12 aa, synthetic construct
  REGION 1..12: note = Ab0760 CDR L1
RASSSVSSSYLH

SEQ ID NO: 430 - protein, 7 aa, synthetic construct
  REGION 1..7: note = Ab0760 CDR L2
STSSRAT

SEQ ID NO: 431 - protein, 9 aa, synthetic construct
  REGION 1..9: note = Ab0760 CDR L3
QQYSGYQFT

SEQ ID NO: 432 - protein, 472 aa, synthetic construct
  REGION 1..472: note = Ab0761 HC Hole scFv-Fc
QVQLVQSGAEVKKPGASVKVSCKASGYTFTSYWMHWVRQAPGQGLEWMGIIHPNSGGTSYAQKFQGRVTMTRDTSTSTVYMELSSLRSEDTAVYYCAMGDYVSRDYWGQGTLVTVSSGGGGSGGGGSGGGGSEIVLTQSPGTLSLSPGERATLSCRASSSVSSSYLHWYQQKPGQHPRLLIYSTSSRATGIPDRFSGSGSGTDFTLTISRLEPEDFAVYYCQQYSGYQFTFGQGTKLEIKGGGGSDKTHTCPPCPAPEAAGGPSVFLFPPKPKDTLMISRTPEVTCVVVDVSHEDPEVKFNWYVDGVEVHNAKTKPREEQYNSTYRVVSVLTVLHQDWLNGKEYKCKVSNKALGAPIEKTISKAKGQPREPQVYTLPPIRELMTSNQVSLSCAVKGFYPSDIAVEWESNGQPENNYKTTPPVLDSDGSFFLVSKLTVDKSRWQQGNVFSCSVMHEALHNHYTQKSLSLSPGK

SEQ ID NO: 433 - protein, 238 aa, synthetic construct; identical to SEQ ID NO: 52
  REGION 1..238: note = Ab761 HC Knob Fc-6xHis

SEQ ID NO: 434 - protein, 5 aa, synthetic construct
  REGION 1..5: note = Ab761 CDR H1
SYWMH

SEQ ID NO: 435 - protein, 17 aa, synthetic construct
  REGION 1..17: note = Ab0761 CDR H2
IIHPNSGGTSYAQKFQG

SEQ ID NO: 436 - protein, 8 aa, synthetic construct
  REGION 1..8: note = Ab0761 CDR H3
GDYVSRDY

SEQ ID NO: 437 - protein, 12 aa, synthetic construct
  REGION 1..12: note = Ab0761 CDR L1
RASSSVSSSYLH

SEQ ID NO: 438 - protein, 7 aa, synthetic construct
  REGION 1..7: note = Ab761 CDR L2
STSSRAT

SEQ ID NO: 439 - protein, 9 aa, synthetic construct
  REGION 1..9: note = Ab0761 CDR L3
QQYSGYQFT

SEQ ID NO: 440 - protein, 472 aa, synthetic construct
  REGION 1..472: note = Ab0762 HC Hole scFv-Fc
QVQLVQSGAEVKKPGASVKVSCKASGYTFTSYWMHWVRQAPGQHLEWMGIIHPNSGGTSYAQKFQGRVTMTRDTSTSTVYMELSSLRSEDTAVYYCAMGDYVSRDYWGQGTLVTVSSGGGGSGGGGSGGGGSEIVLTQSPGTLSLSPGERATLSCRASSSVSSSYLHWYQQKPGQAPRLLIYSTSSRATGIPDRFSGSGSGTDFTLTISRLEPEDFAVYYCQQYSGYQFTFGQGTKLEIKGGGGSDKTHTCPPCPAPEAAGGPSVFLFPPKPKDTLMISRTPEVTCVVVDVSHEDPEVKFNWYVDGVEVHNAKTKPREEQYNSTYRVVSVLTVLHQDWLNGKEYKCKVSNKALGAPIEKTISKAKGQPREPQVYTLPPIRELMTSNQVSLSCAVKGFYPSDIAVEWESNGQPENNYKTTPPVLDSDGSFFLVSKLTVDKSRWQQGNVFSCSVMHEALHNHYTQKSLSLSPGK

SEQ ID NO: 441 - protein, 238 aa, synthetic construct; identical to SEQ ID NO: 52
  REGION 1..238: note = Ab0762 HC Knob Fc-6xHis

SEQ ID NO: 442 - protein, 5 aa, synthetic construct
  REGION 1..5: note = Ab0762 CDR H1
SYWMH

SEQ ID NO: 443 - protein, 17 aa, synthetic construct
  REGION 1..17: note = Ab0762 CDR H2
IIHPNSGGTSYAQKFQG

SEQ ID NO: 444 - protein, 8 aa, synthetic construct
  REGION 1..8: note = Ab0762 CDR H3
GDYVSRDY

SEQ ID NO: 445 - protein, 12 aa, synthetic construct
  REGION 1..12: note = Ab0762 CDR L1
RASSSVSSSYLH

SEQ ID NO: 446 - protein, 7 aa, synthetic construct
  REGION 1..7: note = Ab0762 CDR L2
STSSRAT

SEQ ID NO: 447 - protein, 9 aa, synthetic construct
  REGION 1..9: note = Ab0762 CDR L3
QQYSGYQFT

SEQ ID NO: 448 - protein, 472 aa, synthetic construct
  REGION 1..472: note = Ab0763 HC Hole scFv-Fc
QVQLVQSGAEVKKPGASVKVSCKASGYTFTSYWMHWVRQAPGQRLEWMGIIHPNSGGTSYAQKFQGRVTMTRDTSTSTVYMELSSLRSEDTAVYYCAMGDYVSRDYWGQGTLVTVSSGGGGSGGGGSGGGGSEIVLTQSPGTLSLSPGERATLSCRASSSVSSSYLHWYQQKPGQAPRLLIYSTSSRATGIPDRFSGSGSGTDFTLTISRLEPEDFAVYYCQQYSGYQFTFGQGTKLEIKGGGGSDKTHTCPPCPAPEAAGGPSVFLFPPKPKDTLMISRTPEVTCVVVDVSHEDPEVKFNWYVDGVEVHNAKTKPREEQYNSTYRVVSVLTVLHQDWLNGKEYKCKVSNKALGAPIEKTISKAKGQPREPQVYTLPPIRELMTSNQVSLSCAVKGFYPSDIAVEWESNGQPENNYKTTPPVLDSDGSFFLVSKLTVDKSRWQQGNVFSCSVMHEALHNHYTQKSLSLSPGK

SEQ ID NO: 449 - protein, 238 aa, synthetic construct; identical to SEQ ID NO: 52
  REGION 1..238: note = Ab0763 HC Knob Fc-6xHis

SEQ ID NO: 450 - protein, 5 aa, synthetic construct
  REGION 1..5: note = Ab0763 CDR H1
SYWMH

SEQ ID NO: 451 - protein, 17 aa, synthetic construct
  REGION 1..17: note = Ab0763 CDR H2
IIHPNSGGTSYAQKFQG

SEQ ID NO: 452 - protein, 8 aa, synthetic construct
  REGION 1..8: note = Ab0763 CDR H3
GDYVSRDY

SEQ ID NO: 453 - protein, 12 aa, synthetic construct
  REGION 1..12: note = Ab0763 CDR L1
RASSSVSSSYLH

SEQ ID NO: 454 - protein, 7 aa, synthetic construct
  REGION 1..7: note = Ab0763 CDR L2
STSSRAT

SEQ ID NO: 455 - protein, 9 aa, synthetic construct
  REGION 1..9: note = Ab0763 CDR L3
QQYSGYQFT

SEQ ID NO: 456 - protein, 252 aa, synthetic construct
  REGION 1..252: note = Ab0785 HC
QVQLVQSGAEVKKPGASVKVSCKASGYTFTSYWMHWVRQHPGQGLEWMGIIHPNSGGTSYAQKFQGRVTMTRDTSTSTVYMELSSLRSEDTAVYYCAMGDYVSRDYWGQGTLVTVSSASTKGPSVFPLAPSSKSTSGGTAALGCLVKDYFPEPVTVSWNSGALTSGVHTFPAVLQSSGLYSLSSVVTVPSSSLGTQTYICNVNHKPSNTKVDKKVEPKSCGGGGSHHHHHHGGGGSGLNDIFEAQKIEWHEG

SEQ ID NO: 457 - protein, 5 aa, synthetic construct
  REGION 1..5: note = Ab0785 CDR H1
SYWMH

SEQ ID NO: 458 - protein, 17 aa, synthetic construct
  REGION 1..17: note = Ab0785 CDR H2
IIHPNSGGTSYAQKFQG

SEQ ID NO: 459 - protein, 8 aa, synthetic construct
  REGION 1..8: note = Ab0785 CDR H3
GDYVSRDY

SEQ ID NO: 460 - protein, 12 aa, synthetic construct
  REGION 1..12: note = Ab0785 CDR L1
RASSSVSSSYLH

SEQ ID NO: 461 - protein, 7 aa, synthetic construct
  REGION 1..7: note = Ab0785 CDR L2
STSSRAT

SEQ ID NO: 462 - protein, 9 aa, synthetic construct
  REGION 1..9: note = Ab0785 CDR L3
QQYSGYQFT

SEQ ID NO: 463 - protein, 252 aa, synthetic construct
  REGION 1..252: note = Ab0786 HC
QVQLVQSGAEVKKPGASVKVSCKASGYTFTSYWMHWVRQHPGQGLEWMGMIHPNSGGTNYAQKFQGRVTMTRDTSTSTVYMELSSLRSEDTAVYYCAMGDYVSRDYWGQGTLVTVSSASTKGPSVFPLAPSSKSTSGGTAALGCLVKDYFPEPVTVSWNSGALTSGVHTFPAVLQSSGLYSLSSVVTVPSSSLGTQTYICNVNHKPSNTKVDKKVEPKSCGGGGSHHHHHHGGGGSGLNDIFEAQKIEWHEG

SEQ ID NO: 464 - protein, 5 aa, synthetic construct
  REGION 1..5: note = Ab0786 CDR H1
SYWMH

SEQ ID NO: 465 - protein, 17 aa, synthetic construct
  REGION 1..17: note = Ab0786 CDR H2
MIHPNSGGTNYAQKFQG

SEQ ID NO: 466 - protein, 8 aa, synthetic construct
  REGION 1..8: note = Ab0786 CDR H3
GDYVSRDY

SEQ ID NO: 467 - protein, 12 aa, synthetic construct
  REGION 1..12: note = Ab0786 CDR L1
RASSSVSSSYLH

SEQ ID NO: 468 - protein, 7 aa, synthetic construct
  REGION 1..7: note = Ab0786 CDR L2
STSSRAT

SEQ ID NO: 469 - protein, 9 aa, synthetic construct
  REGION 1..9: note = Ab0786 CDR L3
QQYSGYQFT

SEQ ID NO: 470 - protein, 252 aa, synthetic construct
  REGION 1..252: note = Ab0787 HC
QVQLVQSGAEVKKPGASVKVSCKASGYTFTSYWMHWVRQHPGQGLEWMGMIHPNSGGTSYAQKFQGRVTMTRDTSTSTVYMELSSLRSEDTAVYYCAMGDYVSRDYWGQGTLVTVSSASTKGPSVFPLAPSSKSTSGGTAALGCLVKDYFPEPVTVSWNSGALTSGVHTFPAVLQSSGLYSLSSVVTVPSSSLGTQTYICNVNHKPSNTKVDKKVEPKSCGGGGSHHHHHHGGGGSGLNDIFEAQKIEWHEG

SEQ ID NO: 471 - protein, 5 aa, synthetic construct
  REGION 1..5: note = Ab0787 CDR H1
SYWMH

SEQ ID NO: 472 - protein, 17 aa, synthetic construct
  REGION 1..17: note = Ab0787 CDR H2
MIHPNSGGTSYAQKFQG

SEQ ID NO: 473 - protein, 8 aa, synthetic construct
  REGION 1..8: note = Ab0787 CDR H3
GDYVSRDY

SEQ ID NO: 474 - protein, 12 aa, synthetic construct
  REGION 1..12: note = Ab0787 CDR L1
RASSSVSSSYLH

SEQ ID NO: 475 - protein, 7 aa, synthetic construct
  REGION 1..7: note = Ab0787 CDR L2
STSSRAT

SEQ ID NO: 476 - protein, 9 aa, synthetic construct
  REGION 1..9: note = Ab0787 CDR L3
QQYSGYQFT

SEQ ID NO: 477 - protein, 252 aa, synthetic construct
  REGION 1..252: note = Ab0788 HC
QVQLVQSGAEVKKPGASVKVSCKASGYTFTSYWMHWVRQHPGQGLEWMGIIHPNSGGTNYAQKFQGRVTMTRDTSTSTVYMELSSLRSEDTAVYYCAMGDYVSRDYWGQGTLVTVSSASTKGPSVFPLAPSSKSTSGGTAALGCLVKDYFPEPVTVSWNSGALTSGVHTFPAVLQSSGLYSLSSVVTVPSSSLGTQTYICNVNHKPSNTKVDKKVEPKSCGGGGSHHHHHHGGGGSGLNDIFEAQKIEWHEG

SEQ ID NO: 478 - protein, 5 aa, synthetic construct
  REGION 1..5: note = Ab0788 CDR H1
SYWMH

SEQ ID NO: 479 - protein, 17 aa, synthetic construct
  REGION 1..17: note = Ab0788 CDR H2
IIHPNSGGTNYAQKFQG

SEQ ID NO: 480 - protein, 8 aa, synthetic construct
  REGION 1..8: note = Ab0788 CDR H3
GDYVSRDY

SEQ ID NO: 481 - protein, 12 aa, synthetic construct
  REGION 1..12: note = Ab0788 CDR L1
RASSSVSSSYLH

SEQ ID NO: 482 - protein, 7 aa, synthetic construct
  REGION 1..7: note = Ab0788 CDR L2
STSSRAT

SEQ ID NO: 483 - protein, 9 aa, synthetic construct
  REGION 1..9: note = Ab0788 CDR L3
QQYSGYQFT

SEQ ID NO: 484 - protein, 215 aa, synthetic construct
  REGION 1..215: note = LC Sequence
EIVLTQSPGTLSLSPGERATLSCRASSSVSSSYLHWYQQKPGQAPRLLIYSTSSRATGIPDRFSGSGSGTDFTLTISRLEPEDFAVYYCQQYSGYQFTFGQGTKLEIKRTVAAPSVFIFPPSDEQLKSGTASVVCLLNNFYPREAKVQWKVDNALQSGNSQESVTEQDSKDSTYSLSSTLTLSKADYEKHKVYACEVTHQGLSSPVTKSFNRGEC

SEQ ID NO: 485 - protein, 472 aa, synthetic construct
  REGION 1..472: note = Ab0898 HC
QVQLVQSGAEVKKPGASVKVSCKASGYTFTSYWMHWVRQHPGQGLEWMGIIHPNSGGTSYAQKFQGRVTMTRDTSTSTVYMELSSLRSEDTAVYYCAMGDYVSRDYWGQGTLVTVSSGGGGSGGGGSGGGGSEIVLTQSPGTLSLSPGERATLSCRASSSVSSSYLHWYQQKPGQAPRLLIYSTSSRATGIPDRFSGSGSGTDFTLTISRLEPEDFAVYYCQQYSGYQFTFGQGTKLEIKGGGGSDKTHTCPPCPAPEAAGGPSVFLFPPKPKDTLMISRTPEVTCVVVDVSHEDPEVKFNWYVDGVEVHNAKTKPREEQYNSTYRVVSVLTVLHQDWLNGKEYKCKVSNKALGAPIEKTISKAKGQPREPQVYTLPPSRDELTKNQVSLTCLVKGFYPSDIAVEWESNGQPENNYKTTPPVLDSDGSFFLYSKLTVDKSRWQQGNVFSCSVMHEALHNHYTQKSLSLSPGK

SEQ ID NO: 486 - protein, 5 aa, synthetic construct
  REGION 1..5: note = Ab0898 CDR H1
SYWMH

SEQ ID NO: 487 - protein, 17 aa, synthetic construct
  REGION 1..17: note = Ab0898 CDR H2
IIHPNSGGTSYAQKFQG

SEQ ID NO: 488 - protein, 8 aa, synthetic construct
  REGION 1..8: note = Ab0898 CDR H3
GDYVSRDY

SEQ ID NO: 489 - protein, 12 aa, synthetic construct
  REGION 1..12: note = Ab0898 CDR L1
RASSSVSSSYLH

SEQ ID NO: 490 - protein, 7 aa, synthetic construct
  REGION 1..7: note = Ab0898 CDR L2
STSSRAT

SEQ ID NO: 491 - protein, 9 aa, synthetic construct
  REGION 1..9: note = Ab0898 CDR L3
QQYSGYQFT

SEQ ID NO: 492 - protein, 472 aa, synthetic construct
  REGION 1..472: note = Ab0899 HC
QVQLVQSGAEVKKPGASVKVSCKASGYTFTSYWMHWVRQHPGQGLEWMGMIHPNSGGTNYAQKFQGRVTMTRDTSTSTVYMELSSLRSEDTAVYYCAMGDYVSRDYWGQGTLVTVSSGGGGSGGGGSGGGGSEIVLTQSPGTLSLSPGERATLSCRASSSVSSSYLHWYQQKPGQAPRLLIYSTSSRATGIPDRFSGSGSGTDFTLTISRLEPEDFAVYYCQQYSGYQFTFGQGTKLEIKGGGGSDKTHTCPPCPAPEAAGGPSVFLFPPKPKDTLMISRTPEVTCVVVDVSHEDPEVKFNWYVDGVEVHNAKTKPREEQYNSTYRVVSVLTVLHQDWLNGKEYKCKVSNKALGAPIEKTISKAKGQPREPQVYTLPPSRDELTKNQVSLTCLVKGFYPSDIAVEWESNGQPENNYKTTPPVLDSDGSFFLYSKLTVDKSRWQQGNVFSCSVMHEALHNHYTQKSLSLSPGK

SEQ ID NO: 493 - protein, 5 aa, synthetic construct
  REGION 1..5: note = Ab0899 CDR H1
SYWMH

SEQ ID NO: 494 - protein, 17 aa, synthetic construct
  REGION 1..17: note = Ab0899 CDR H2
MIHPNSGGTNYAQKFQG

SEQ ID NO: 495 - protein, 8 aa, synthetic construct
  REGION 1..8: note = Ab0899 CDR H3
GDYVSRDY

SEQ ID NO: 496 - protein, 12 aa, synthetic construct
  REGION 1..12: note = Ab0899 CDR L1
RASSSVSSSYLH

SEQ ID NO: 497 - protein, 7 aa, synthetic construct
  REGION 1..7: note = Ab0899 CDR L2
STSSRAT

SEQ ID NO: 498 - protein, 9 aa, synthetic construct
  REGION 1..9: note = Ab0899 CDR L3
QQYSGYQFT

SEQ ID NO: 499 - protein, 472 aa, synthetic construct
  REGION 1..472: note = Ab0900 HC
QVQLVQSGAEVKKPGASVKVSCKASGYTFTSYWMHWVRQHPGQGLEWMGMIHPNSGGTSYAQKFQGRVTMTRDTSTSTVYMELSSLRSEDTAVYYCAMGDYVSRDYWGQGTLVTVSSGGGGSGGGGSGGGGSEIVLTQSPGTLSLSPGERATLSCRASSSVSSSYLHWYQQKPGQAPRLLIYSTSSRATGIPDRFSGSGSGTDFTLTISRLEPEDFAVYYCQQYSGYQFTFGQGTKLEIKGGGGSDKTHTCPPCPAPEAAGGPSVFLFPPKPKDTLMISRTPEVTCVVVDVSHEDPEVKFNWYVDGVEVHNAKTKPREEQYNSTYRVVSVLTVLHQDWLNGKEYKCKVSNKALGAPIEKTISKAKGQPREPQVYTLPPSRDELTKNQVSLTCLVKGFYPSDIAVEWESNGQPENNYKTTPPVLDSDGSFFLYSKLTVDKSRWQQGNVFSCSVMHEALHNHYTQKSLSLSPGK

SEQ ID NO: 500 - protein, 5 aa, synthetic construct
  REGION 1..5: note = Ab0900 CDR H1
SYWMH

SEQ ID NO: 501 - protein, 17 aa, synthetic construct
  REGION 1..17: note = Ab0900 CDR H2
MIHPNSGGTSYAQKFQG

SEQ ID NO: 502 - protein, 8 aa, synthetic construct
  REGION 1..8: note = Ab0900 CDR H3
GDYVSRDY

SEQ ID NO: 503 - protein, 12 aa, synthetic construct
  REGION 1..12: note = Ab0900 CDR L1
RASSSVSSSYLH

SEQ ID NO: 504 - protein, 7 aa, synthetic construct
  REGION 1..7: note = Ab0900 CDR L2
STSSRAT

SEQ ID NO: 505 - protein, 9 aa, synthetic construct
  REGION 1..9: note = Ab0900 CDR L3
QQYSGYQFT

SEQ ID NO: 506 - protein, 471 aa, synthetic construct
  REGION 1..471: note = Ab1094 HC Hole scFv-Fc
QVQLVQSGAEVKKPGASVKVSCKASGYTFTSYWMHWVRQHPGQGLEWMGMIHPNSGGTNYAQKFQGRVTMTRDTSTSTVYMELSSLRSEDTAVYYCAMGDYVSRDYWGQGTLVTVSSGGGGSGGGGSGGGGSEIVLTQSPGTLSLSPGERATLSCRASSSVSSSYLHWYQQKPGQAPRLLIYSTSSRATGIPDRFSGSGSGTDFTLTISRLEPEDFAVYYCQQYSGYQFTFGQGTKLEIKGGGGSDKTHTCPPCPAPEAAGGPSVFLFPPKPKDTLMISRTPEVTCVVVDVSHEDPEVKFNWYVDGVEVHNAKTKPREEQYNSTYRVVSVLTVLHQDWLNGKEYKCKVSNKALPAPIEKTISKAKGQPREPQVYTLPPSRDELTKNQVSLSCAVKGFYPSDIAVEWESNGQPENNYKTTPPVLDSDGSFFLVSKLTVDKSRWQQGNVFSCSVMHEALHNHYTQKSLSLSPG

SEQ ID NO: 507 - protein, 215 aa, synthetic construct
  REGION 1..215: note = Ab1094 LC Knob
DIQMTQSPSSLSASVGDRVTITCSASSSVSSGNFHWYQQKPGKAPKLLIYRTSNLASGVPSRFSGSGSGTDYTLTISSLQPEDFATYYCQQASGYPYTFGQGTKVEIKRTVAAPSVFIFPPSDEQLKSGTASVVCLLNNFYPREAKVQWKVDNALQSGNSQESVTEQDSKDSTYSLSSTLTLSKADYEKHKVYACEVTHQGLSSPVTKSFNRGEC

SEQ ID NO: 508 - protein, 445 aa, synthetic construct
  REGION 1..445: note = HC Knob
EVQLVESGGGLVQPGGSLRLSCAASGFTFSNYWMNWVRQAPGKGLEWVAQIRVKSENFATHYVDSVKGRFTISRDDSKSTVYLQMNSLRAEDTAVYYCTLYDGFSWGQGTLVTVSSASTKGPSVFPLAPSSKSTSGGTAALGCLVKDYFPEPVTVSWNSGALTSGVHTFPAVLQSSGLYSLSSVVTVPSSSLGTQTYICNVNHKPSNTKVDKKVEPKSCDKTHTCPPCPAPEAAGGPSVFLFPPKPKDTLMISRTPEVTCVVVDVSHEDPEVKFNWYVDGVEVHNAKTKPREEQYNSTYRVVSVLTVLHQDWLNGKEYKCKVSNKALPAPIEKTISKAKGQPREPQVYTLPPSRDELTKNQVSLWCLVKGFYPSDIAVEWESNGQPENNYKTTPPVLDSDGSFFLYSKLTVDKSRWQQGNVFSCSVMHEALHNHYTQKSLSLSPG

SEQ ID NO: 509 - protein, 5 aa, synthetic construct
  REGION 1..5: note = Ab1094 CDR H1
SYWMH

SEQ ID NO: 510 - protein, 17 aa, synthetic construct
  REGION 1..17: note = Ab1094 CDR H2
MIHPNSGGTNYAQKFQG

SEQ ID NO: 511 - protein, 8 aa, synthetic construct
  REGION 1..8: note = Ab1094 CDR H3
GDYVSRDY

SEQ ID NO: 512 - protein, 12 aa, synthetic construct
  REGION 1..12: note = Ab1094 CDR L1
RASSSVSSSYLH

SEQ ID NO: 513 - protein, 7 aa, synthetic construct
  REGION 1..7: note = Ab1094 CDR L2
STSSRAT

SEQ ID NO: 514 - protein, 9 aa, synthetic construct
  REGION 1..9: note = Ab1094 CDR L3
QQYSGYQFT

SEQ ID NO: 515 - protein, 471 aa, synthetic construct
  REGION 1..471: note = Ab1095 HC Hole scFv-Fc
QVQLVQSGAEVKKPGASVKVSCKASGYTFTSYAMHWVRQHPGQGLEWMGMIHPNSGGTNYAQKFQGRVTMTRDTSTSTVYMELSSLRSEDTAVYYCAMGDYVSRDYWGQGTLVTVSSGGGGSGGGGSGGGGSEIVLTQSPGTLSLSPGERATLSCRASSSVSSSYLHWYQQKPGQAPRLLIYSTSSRATGIPDRFSGSGSGTDFTLTISRLEPEDFAVYYCQQYSGYQFTFGQGTKLEIKGGGGSDKTHTCPPCPAPEAAGGPSVFLFPPKPKDTLMISRTPEVTCVVVDVSHEDPEVKFNWYVDGVEVHNAKTKPREEQYNSTYRVVSVLTVLHQDWLNGKEYKCKVSNKALPAPIEKTISKAKGQPREPQVYTLPPSRDELTKNQVSLSCAVKGFYPSDIAVEWESNGQPENNYKTTPPVLDSDGSFFLVSKLTVDKSRWQQGNVFSCSVMHEALHNHYTQKSLSLSPG

SEQ ID NO: 516 - protein, 215 aa, synthetic construct
  REGION 1..215: note = Ab1095 LC Knob
DIQMTQSPSSLSASVGDRVTITCSASSSVSSGNFHWYQQKPGKAPKLLIYRTSNLASGVPSRFSGSGSGTDYTLTISSLQPEDFATYYCQQWSGYPYTFGQGTKVEIKRTVAAPSVFIFPPSDEQLKSGTASVVCLLNNFYPREAKVQWKVDNALQSGNSQESVTEQDSKDSTYSLSSTLTLSKADYEKHKVYACEVTHQGLSSPVTKSFNRGEC

SEQ ID NO: 517 - protein, 445 aa, synthetic construct
  REGION 1..445: note = Ab1095 HC Knob
EVQLVESGGGLVQPGGSLRLSCAASGFTFSNYWMNWVRQAPGKGLEWVAQIRVKSENFATHYADSVKGRFTISRDDSKSTVYLQMNSLRAEDTAVYYCTLYDGFSWGQGTLVTVSSASTKGPSVFPLAPSSKSTSGGTAALGCLVKDYFPEPVTVSWNSGALTSGVHTFPAVLQSSGLYSLSSVVTVPSSSLGTQTYICNVNHKPSNTKVDKKVEPKSCDKTHTCPPCPAPEAAGGPSVFLFPPKPKDTLMISRTPEVTCVVVDVSHEDPEVKFNWYVDGVEVHNAKTKPREEQYNSTYRVVSVLTVLHQDWLNGKEYKCKVSNKALPAPIEKTISKAKGQPREPQVYTLPPSRDELTKNQVSLWCLVKGFYPSDIAVEWESNGQPENNYKTTPPVLDSDGSFFLYSKLTVDKSRWQQGNVFSCSVMHEALHNHYTQKSLSLSPG

SEQ ID NO: 518 - protein, 5 aa, synthetic construct
  REGION 1..5: note = Ab1095 CDR H1
SYAMH

SEQ ID NO: 519 - protein, 17 aa, synthetic construct
  REGION 1..17: note = Ab1095 CDR H2
MIHPNSGGTNYAQKFQG

SEQ ID NO: 520 - protein, 8 aa, synthetic construct
  REGION 1..8: note = Ab1095 CDR H3
GDYVSRDY

SEQ ID NO: 521 - protein, 12 aa, synthetic construct
  REGION 1..12: note = Ab1095 CDR L1
RASSSVSSSYLH

SEQ ID NO: 522 - protein, 7 aa, synthetic construct
  REGION 1..7: note = Ab1095 CDR L2
STSSRAT

SEQ ID NO: 523 - protein, 9 aa, synthetic construct
  REGION 1..9: note = Ab1095 CDR L3
QQYSGYQFT

SEQ ID NO: 524 - protein, 471 aa, synthetic construct
  REGION 1..471: note = Ab1096 HC Hole scFv-Fc
QVQLVQSGAEVKKPGASVKVSCKASGYTFTSYFMHWVRQHPGQGLEWMGMIHPNSGGTNYAQKFQGRVTMTRDTSTSTVYMELSSLRSEDTAVYYCAMGDYVSRDYWGQGTLVTVSSGGGGSGGGGSGGGGSEIVLTQSPGTLSLSPGERATLSCRASSSVSSSYLHWYQQKPGQAPRLLIYSTSSRATGIPDRFSGSGSGTDFTLTISRLEPEDFAVYYCQQYSGYQFTFGQGTKLEIKGGGGSDKTHTCPPCPAPEAAGGPSVFLFPPKPKDTLMISRTPEVTCVVVDVSHEDPEVKFNWYVDGVEVHNAKTKPREEQYNSTYRVVSVLTVLHQDWLNGKEYKCKVSNKALPAPIEKTISKAKGQPREPQVYTLPPSRDELTKNQVSLSCAVKGFYPSDIAVEWESNGQPENNYKTTPPVLDSDGSFFLVSKLTVDKSRWQQGNVFSCSVMHEALHNHYTQKSLSLSPG

SEQ ID NO: 525 - protein, 215 aa, synthetic construct; identical to SEQ ID NO: 516
  REGION 1..215: note = Ab1096 LC Knob

SEQ ID NO: 526 - protein, 445 aa, synthetic construct; identical to SEQ ID NO: 517
  REGION 1..445: note = Ab1096 HC knob

SEQ ID NO: 527 - protein, 5 aa, synthetic construct
  REGION 1..5: note = Ab1096 CDR H1
SYFMH

SEQ ID NO: 528 - protein, 17 aa, synthetic construct
  REGION 1..17: note = Ab1096 CDR H2
MIHPNSGGTNYAQKFQG

SEQ ID NO: 529 - protein, 8 aa, synthetic construct
  REGION 1..8: note = Ab1096 CDR H3
GDYVSRDY

SEQ ID NO: 530 - protein, 12 aa, synthetic construct
  REGION 1..12: note = Ab1096 CDR L1
RASSSVSSSYLH

SEQ ID NO: 531 - protein, 7 aa, synthetic construct
  REGION 1..7: note = Ab1096 CDR L2
STSSRAT

SEQ ID NO: 532 - protein, 9 aa, synthetic construct
  REGION 1..9: note = Ab1096 CDR L3
QQYSGYQFT

SEQ ID NO: 533 - protein, 471 aa, synthetic construct
  REGION 1..471: note = Ab1097 HC Hole scFv-Fc
QVQLVQSGAEVKKPGASVKVSCKASGYTFTSYHMHWVRQHPGQGLEWMGMIHPNSGGTNYAQKFQGRVTMTRDTSTSTVYMELSSLRSEDTAVYYCAMGDYVSRDYWGQGTLVTVSSGGGGSGGGGSGGGGSEIVLTQSPGTLSLSPGERATLSCRASSSVSSSYLHWYQQKPGQAPRLLIYSTSSRATGIPDRFSGSGSGTDFTLTISRLEPEDFAVYYCQQYSGYQFTFGQGTKLEIKGGGGSDKTHTCPPCPAPEAAGGPSVFLFPPKPKDTLMISRTPEVTCVVVDVSHEDPEVKFNWYVDGVEVHNAKTKPREEQYNSTYRVVSVLTVLHQDWLNGKEYKCKVSNKALPAPIEKTISKAKGQPREPQVYTLPPSRDELTKNQVSLSCAVKGFYPSDIAVEWESNGQPENNYKTTPPVLDSDGSFFLVSKLTVDKSRWQQGNVFSCSVMHEALHNHYTQKSLSLSPG

SEQ ID NO: 534 - protein, 215 aa, synthetic construct; identical to SEQ ID NO: 516
  REGION 1..215: note = Ab1097 LC Knob

SEQ ID NO: 535 - protein, 445 aa, synthetic construct; identical to SEQ ID NO: 517
  REGION 1..445: note = Ab1097 HC Knob

SEQ ID NO: 536 - protein, 5 aa, synthetic construct
  REGION 1..5: note = Ab1097 CDR H1
SYHMH

SEQ ID NO: 537 - protein, 17 aa, synthetic construct
  REGION 1..17: note = Ab1097 CDR H2
MIHPNSGGTNYAQKFQG

SEQ ID NO: 538 - protein, 8 aa, synthetic construct
  REGION 1..8: note = Ab1097 CDR H3
GDYVSRDY

SEQ ID NO: 539 - protein, 12 aa, synthetic construct
  REGION 1..12: note = Ab1097 CDR L1
RASSSVSSSYLH

SEQ ID NO: 540 - protein, 7 aa, synthetic construct
  REGION 1..7: note = Ab1097 CDR L2
STSSRAT

SEQ ID NO: 541 - protein, 9 aa, synthetic construct
  REGION 1..9: note = Ab1097 CDR L3
QQYSGYQFT

SEQ ID NO: 542 - protein, 471 aa, synthetic construct
  REGION 1..471: note = Ab1098 HC Hole scFv-Fc
QVQLVQSGAEVKKPGASVKVSCKASGYTFTSYLMHWVRQHPGQGLEWMGMIHPNSGGTNYAQKFQGRVTMTRDTSTSTVYMELSSLRSEDTAVYYCAMGDYVSRDYWGQGTLVTVSSGGGGSGGGGSGGGGSEIVLTQSPGTLSLSPGERATLSCRASSSVSSSYLHWYQQKPGQAPRLLIYSTSSRATGIPDRFSGSGSGTDFTLTISRLEPEDFAVYYCQQYSGYQFTFGQGTKLEIKGGGGSDKTHTCPPCPAPEAAGGPSVFLFPPKPKDTLMISRTPEVTCVVVDVSHEDPEVKFNWYVDGVEVHNAKTKPREEQYNSTYRVVSVLTVLHQDWLNGKEYKCKVSNKALPAPIEKTISKAKGQPREPQVYTLPPSRDELTKNQVSLSCAVKGFYPSDIAVEWESNGQPENNYKTTPPVLDSDGSFFLVSKLTVDKSRWQQGNVFSCSVMHEALHNHYTQKSLSLSPG

SEQ ID NO: 543 - protein, 215 aa, synthetic construct; identical to SEQ ID NO: 516
  REGION 1..215: note = Ab1098 LC Knob

SEQ ID NO: 544 - protein, 445 aa, synthetic construct; identical to SEQ ID NO: 517
  REGION 1..445: note = HC Knob

SEQ ID NO: 545 - protein, 5 aa, synthetic construct
  REGION 1..5: note = Ab1098 CDR H1
SYLMH

SEQ ID NO: 546 - protein, 17 aa, synthetic construct
  REGION 1..17: note = Ab1098 CDR H2
MIHPNSGGTNYAQKFQG

SEQ ID NO: 547 - protein, 8 aa, synthetic construct
  REGION 1..8: note = Ab1098 CDR H3
GDYVSRDY

SEQ ID NO: 548 - protein, 12 aa, synthetic construct
  REGION 1..12: note = Ab1098 CDR L1
RASSSVSSSYLH

SEQ ID NO: 549 - protein, 7 aa, synthetic construct
  REGION 1..7: note = Ab1098 CDR L2
STSSRAT

SEQ ID NO: 550 - protein, 9 aa, synthetic construct
  REGION 1..9: note = Ab1098 CDR L3
QQYSGYQFT

SEQ ID NO: 551 - protein, 471 aa, synthetic construct
  REGION 1..471: note = Ab1099 HC Hole scFv-Fc
QVQLVQSGAEVKKPGASVKVSCKASGYTFTSYWMAWVRQHPGQGLEWMGMIHPNSGGTNYAQKFQGRVTMTRDTSTSTVYMELSSLRSEDTAVYYCAMGDYVSRDYWGQGTLVTVSSGGGGSGGGGSGGGGSEIVLTQSPGTLSLSPGERATLSCRASSSVSSSYLHWYQQKPGQAPRLLIYSTSSRATGIPDRFSGSGSGTDFTLTISRLEPEDFAVYYCQQYSGYQFTFGQGTKLEIKGGGGSDKTHTCPPCPAPEAAGGPSVFLFPPKPKDTLMISRTPEVTCVVVDVSHEDPEVKFNWYVDGVEVHNAKTKPREEQYNSTYRVVSVLTVLHQDWLNGKEYKCKVSNKALPAPIEKTISKAKGQPREPQVYTLPPSRDELTKNQVSLSCAVKGFYPSDIAVEWESNGQPENNYKTTPPVLDSDGSFFLVSKLTVDKSRWQQGNVFSCSVMHEALHNHYTQKSLSLSPG

SEQ ID NO: 552 - protein, 215 aa, synthetic construct; identical to SEQ ID NO: 516
  REGION 1..215: note = Ab1099 LC Knob

SEQ ID NO: 553 - protein, 445 aa, synthetic construct; identical to SEQ ID NO: 517
  REGION 1..445: note = Ab1099 HC Knob

SEQ ID NO: 554 - protein, 5 aa, synthetic construct
  REGION 1..5: note = Ab1099 CDR H1
SYWMA

SEQ ID NO: 555 - protein, 17 aa, synthetic construct
  REGION 1..17: note = Ab1099 CDR H2
MIHPNSGGTNYAQKFQG

SEQ ID NO: 556 - protein, 8 aa, synthetic construct
  REGION 1..8: note = Ab1099 CDR H3
GDYVSRDY

SEQ ID NO: 557 - protein, 12 aa, synthetic construct
  REGION 1..12: note = Ab1099 CDR L1
RASSSVSSSYLH

SEQ ID NO: 558 - protein, 7 aa, synthetic construct
  REGION 1..7: note = Ab1099 CDR L2
STSSRAT

SEQ ID NO: 559 - protein, 9 aa, synthetic construct
  REGION 1..9: note = Ab1099 CDR L3
QQYSGYQFT

SEQ ID NO: 560 - protein, 471 aa, synthetic construct
  REGION 1..471: note = Ab1100 HC Hole scFv-Fc
QVQLVQSGAEVKKPGASVKVSCKASGYTFTSYWMHWVRQHPGQGLEWMGMINPNSGGTNYAQKFQGRVTMTRDTSTSTVYMELSSLRSEDTAVYYCAMGDYVSRDYWGQGTLVTVSSGGGGSGGGGSGGGGSEIVLTQSPGTLSLSPGERATLSCRASSSVSSSYLHWYQQKPGQAPRLLIYSTSSRATGIPDRFSGSGSGTDFTLTISRLEPEDFAVYYCQQYSGYQFTFGQGTKLEIKGGGGSDKTHTCPPCPAPEAAGGPSVFLFPPKPKDTLMISRTPEVTCVVVDVSHEDPEVKFNWYVDGVEVHNAKTKPREEQYNSTYRVVSVLTVLHQDWLNGKEYKCKVSNKALPAPIEKTISKAKGQPREPQVYTLPPSRDELTKNQVSLSCAVKGFYPSDIAVEWESNGQPENNYKTTPPVLDSDGSFFLVSKLTVDKSRWQQGNVFSCSVMHEALHNHYTQKSLSLSPG

SEQ ID NO: 561 - protein, 215 aa, synthetic construct; identical to SEQ ID NO: 516
  REGION 1..215: note = Ab1100 LC Knob

SEQ ID NO: 562 - protein, 445 aa, synthetic construct; identical to SEQ ID NO: 517
  REGION 1..445: note = Ab1100 HC Knob

SEQ ID NO: 563 - protein, 5 aa, synthetic construct
  REGION 1..5: note = Ab1100 CDR H1
SYWMH

SEQ ID NO: 564 - protein, 17 aa, synthetic construct
  REGION 1..17: note = Ab1100 CDR H2
MINPNSGGTNYAQKFQG

SEQ ID NO: 565 - protein, 8 aa, synthetic construct
  REGION 1..8: note = Ab1100 CDR H3
GDYVSRDY

SEQ ID NO: 566 - protein, 12 aa, synthetic construct
  REGION 1..12: note = Ab1100 CDR L1
RASSSVSSSYLH

SEQ ID NO: 567 - protein, 7 aa, synthetic construct
  REGION 1..7: note = Ab1100 CDR L2
STSSRAT

SEQ ID NO: 568 - protein, 9 aa, synthetic construct
  REGION 1..9: note = Ab1100 CDR L3
QQYSGYQFT

SEQ ID NO: 569 - protein, 471 aa, synthetic construct
  REGION 1..471: note = Ab1101 HC Hole scFv-Fc
QVQLVQSGAEVKKPGASVKVSCKASGYTFTSYWMHWVRQHPGQGLEWMGMIAPNSGGTNYAQKFQGRVTMTRDTSTSTVYMELSSLRSEDTAVYYCAMGDYVSRDYWGQGTLVTVSSGGGGSGGGGSGGGGSEIVLTQSPGTLSLSPGERATLSCRASSSVSSSYLHWYQQKPGQAPRLLIYSTSSRATGIPDRFSGSGSGTDFTLTISRLEPEDFAVYYCQQYSGYQFTFGQGTKLEIKGGGGSDKTHTCPPCPAPEAAGGPSVFLFPPKPKDTLMISRTPEVTCVVVDVSHEDPEVKFNWYVDGVEVHNAKTKPREEQYNSTYRVVSVLTVLHQDWLNGKEYKCKVSNKALPAPIEKTISKAKGQPREPQVYTLPPSRDELTKNQVSLSCAVKGFYPSDIAVEWESNGQPENNYKTTPPVLDSDGSFFLVSKLTVDKSRWQQGNVFSCSVMHEALHNHYTQKSLSLSPG

SEQ ID NO: 570 - protein, 215 aa, synthetic construct; identical to SEQ ID NO: 516
  REGION 1..215: note = Ab1101 LC Knob

SEQ ID NO: 571 - protein, 445 aa, synthetic construct; identical to SEQ ID NO: 517
  REGION 1..445: note = Ab1101 HC Knob

SEQ ID NO: 572 - protein, 5 aa, synthetic construct
  REGION 1..5: note = Ab1101 CDR H1
SYWMH

SEQ ID NO: 573 - protein, 17 aa, synthetic construct
  REGION 1..17: note = Ab1101 CDR H2
MIAPNSGGTNYAQKFQG

SEQ ID NO: 574 - protein, 8 aa, synthetic construct
  REGION 1..8: note = Ab1101 CDR H3
GDYVSRDY

SEQ ID NO: 575 - protein, 12 aa, synthetic construct
  REGION 1..12: note = Ab1101 CDR L1
RASSSVSSSYLH

SEQ ID NO: 576 - protein, 7 aa, synthetic construct
  REGION 1..7: note = Ab1101 CDR L2
STSSRAT

SEQ ID NO: 577 - protein, 9 aa, synthetic construct
  REGION 1..9: note = Ab1101 CDR L3
QQYSGYQFT

SEQ ID NO: 578 - protein, 471 aa, synthetic construct
  REGION 1..471: note = Ab1102 HC Hole scFv-Fc
QVQLVQSGAEVKKPGASVKVSCKASGYTFTSYWMHWVRQHPGQGLEWMGMIHPNSGGTNYAQKFQGRVTMTRDTSTSTVYMELSSLRSEDTAVYYCAMGDYVSADYWGQGTLVTVSSGGGGSGGGGSGGGGSEIVLTQSPGTLSLSPGERATLSCRASSSVSSSYLHWYQQKPGQAPRLLIYSTSSRATGIPDRFSGSGSGTDFTLTISRLEPEDFAVYYCQQYSGYQFTFGQGTKLEIKGGGGSDKTHTCPPCPAPEAAGGPSVFLFPPKPKDTLMISRTPEVTCVVVDVSHEDPEVKFNWYVDGVEVHNAKTKPREEQYNSTYRVVSVLTVLHQDWLNGKEYKCKVSNKALPAPIEKTISKAKGQPREPQVYTLPPSRDELTKNQVSLSCAVKGFYPSDIAVEWESNGQPENNYKTTPPVLDSDGSFFLVSKLTVDKSRWQQGNVFSCSVMHEALHNHYTQKSLSLSPG

SEQ ID NO: 579 - protein, 215 aa, synthetic construct; identical to SEQ ID NO: 516
  REGION 1..215: note = Ab1102 LC Knob

SEQ ID NO: 580 - protein, 445 aa, synthetic construct; identical to SEQ ID NO: 517
  REGION 1..445: note = Ab1102 HC Knob

SEQ ID NO: 581 - protein, 5 aa, synthetic construct
  REGION 1..5: note = Ab1102 CDR H1
SYWMH

SEQ ID NO: 582 - protein, 17 aa, synthetic construct
  REGION 1..17: note = Ab1102 CDR H2
MIHPNSGGTNYAQKFQG

SEQ ID NO: 583 - protein, 8 aa, synthetic construct
  REGION 1..8: note = Ab1102 CDR H3
GDYVSADY

SEQ ID NO: 584 - protein, 12 aa, synthetic construct
  REGION 1..12: note = Ab1102 CDR L1
RASSSVSSSYLH

SEQ ID NO: 585 - protein, 7 aa, synthetic construct
  REGION 1..7: note = Ab1102 CDR L2
STSSRAT

SEQ ID NO: 586 - protein, 9 aa, synthetic construct
  REGION 1..9: note = Ab1102 CDR L3
QQYSGYQFT

SEQ ID NO: 587 - protein, 471 aa, synthetic construct
  REGION 1..471: note = Ab1103 HC Hole scFv-Fc
QVQLVQSGAEVKKPGASVKVSCKASGYTFTSYWMHWVRQHPGQGLEWMGMIHPASGGTNYAQKFQGRVTMTRDTSTSTVYMELSSLRSEDTAVYYCAMGDYVSRDYWGQGTLVTVSSGGGGSGGGGSGGGGSEIVLTQSPGTLSLSPGERATLSCRASSSVSSSYLHWYQQKPGQAPRLLIYSTSSRATGIPDRFSGSGSGTDFTLTISRLEPEDFAVYYCQQYSGYQFTFGQGTKLEIKGGGGSDKTHTCPPCPAPEAAGGPSVFLFPPKPKDTLMISRTPEVTCVVVDVSHEDPEVKFNWYVDGVEVHNAKTKPREEQYNSTYRVVSVLTVLHQDWLNGKEYKCKVSNKALPAPIEKTISKAKGQPREPQVYTLPPSRDELTKNQVSLSCAVKGFYPSDIAVEWESNGQPENNYKTTPPVLDSDGSFFLVSKLTVDKSRWQQGNVFSCSVMHEALHNHYTQKSLSLSPG

SEQ ID NO: 588 - protein, 215 aa, synthetic construct; identical to SEQ ID NO: 516
  REGION 1..215: note = Ab1103 LC Knob

SEQ ID NO: 589 - protein, 445 aa, synthetic construct; identical to SEQ ID NO: 517
  REGION 1..445: note = Ab1103 HC Knob

SEQ ID NO: 590 - protein, 5 aa, synthetic construct
  REGION 1..5: note = Ab1103 CDR H1
SYWMH

SEQ ID NO: 591 - protein, 17 aa, synthetic construct
  REGION 1..17: note = Ab1103 CDR H2
MIHPASGGTNYAQKFQG

SEQ ID NO: 592 - protein, 8 aa, synthetic construct
  REGION 1..8: note = Ab1103 CDR H3
GDYVSRDY

SEQ ID NO: 593 - protein, 12 aa, synthetic construct
  REGION 1..12: note = Ab1103 CDR L1
RASSSVSSSYLH

SEQ ID NO: 594 - protein, 7 aa, synthetic construct
  REGION 1..7: note = Ab1103 CDR L2
STSSRAT

SEQ ID NO: 595 - protein, 9 aa, synthetic construct
  REGION 1..9: note = Ab1103 CDR L3
QQYSGYQFT

SEQ ID NO: 596 - protein, 471 aa, synthetic construct
  REGION 1..471: note = Ab1104 HC Hole scFv-Fc
QVQLVQSGAEVKKPGASVKVSCKASGYTFTSYWMHWVRQHPGQGLEWMGMIHPSSGGTNYAQKFQGRVTMTRDTSTSTVYMELSSLRSEDTAVYYCAMGDYVSRDYWGQGTLVTVSSGGGGSGGGGSGGGGSEIVLTQSPGTLSLSPGERATLSCRASSSVSSSYLHWYQQKPGQAPRLLIYSTSSRATGIPDRFSGSGSGTDFTLTISRLEPEDFAVYYCQQYSGYQFTFGQGTKLEIKGGGGSDKTHTCPPCPAPEAAGGPSVFLFPPKPKDTLMISRTPEVTCVVVDVSHEDPEVKFNWYVDGVEVHNAKTKPREEQYNSTYRVVSVLTVLHQDWLNGKEYKCKVSNKALPAPIEKTISKAKGQPREPQVYTLPPSRDELTKNQVSLSCAVKGFYPSDIAVEWESNGQPENNYKTTPPVLDSDGSFFLVSKLTVDKSRWQQGNVFSCSVMHEALHNHYTQKSLSLSPG

SEQ ID NO: 597 - protein, 215 aa, synthetic construct; identical to SEQ ID NO: 516
  REGION 1..215: note = Ab1104 LC Knob

SEQ ID NO: 598 - protein, 445 aa, synthetic construct; identical to SEQ ID NO: 517
  REGION 1..445: note = Ab1104 HC Knob

SEQ ID NO: 599 - protein, 5 aa, synthetic construct
  REGION 1..5: note = Ab1104 CDR H1
SYWMH

SEQ ID NO: 600 - protein, 17 aa, synthetic construct
  REGION 1..17: note = Ab1104 CDR H2
MIHPSSGGTNYAQKFQG

SEQ ID NO: 601 - protein, 8 aa, synthetic construct
  REGION 1..8: note = Ab1104 CDR H3
GDYVSRDY

SEQ ID NO: 602 - protein, 12 aa, synthetic construct
  REGION 1..12: note = Ab1104 CDR L1
RASSSVSSSYLH

SEQ ID NO: 603 - protein, 7 aa, synthetic construct
  REGION 1..7: note = Ab1104 CDR L2
STSSRAT

SEQ ID NO: 604 - protein, 9 aa, synthetic construct
  REGION 1..9: note = Ab1104 CDR L3
QQYSGYQFT

SEQ ID NO: 605 - protein, 471 aa, synthetic construct
  REGION 1..471: note = Ab1105 HC Hole scFv-Fc
QVQLVQSGAEVKKPGASVKVSCKASGYTFTSYWMHWVRQHPGQGLEWMGMIHPQSGGTNYAQKFQGRVTMTRDTSTSTVYMELSSLRSEDTAVYYCAMGDYVSRDYWGQGTLVTVSSGGGGSGGGGSGGGGSEIVLTQSPGTLSLSPGERATLSCRASSSVSSSYLHWYQQKPGQAPRLLIYSTSSRATGIPDRFSGSGSGTDFTLTISRLEPEDFAVYYCQQYSGYQFTFGQGTKLEIKGGGGSDKTHTCPPCPAPEAAGGPSVFLFPPKPKDTLMISRTPEVTCVVVDVSHEDPEVKFNWYVDGVEVHNAKTKPREEQYNSTYRVVSVLTVLHQDWLNGKEYKCKVSNKALPAPIEKTISKAKGQPREPQVYTLPPSRDELTKNQVSLSCAVKGFYPSDIAVEWESNGQPENNYKTTPPVLDSDGSFFLVSKLTVDKSRWQQGNVFSCSVMHEALHNHYTQKSLSLSPG

SEQ ID NO: 606 - protein, 215 aa, synthetic construct; identical to SEQ ID NO: 516
  REGION 1..215: note = Ab1105 LC Knob

SEQ ID NO: 607 - protein, 445 aa, synthetic construct; identical to SEQ ID NO: 517
  REGION 1..445: note = Ab1105 HC Knob

SEQ ID NO: 608 - protein, 5 aa, synthetic construct
  REGION 1..5: note = Ab1105 CDR H1
SYWMH

SEQ ID NO: 609 - protein, 17 aa, synthetic construct
  REGION 1..17: note = Ab1105 CDR H2
MIHPQSGGTNYAQKFQG

SEQ ID NO: 610 - protein, 8 aa, synthetic construct
  REGION 1..8: note = Ab1105 CDR H3
GDYVSRDY

SEQ ID NO: 611 - protein, 12 aa, synthetic construct
  REGION 1..12: note = Ab1105 CDR L1
RASSSVSSSYLH

SEQ ID NO: 612 - protein, 7 aa, synthetic construct
  REGION 1..7: note = Ab1105 CDR L2
STSSRAT

SEQ ID NO: 613 - protein, 9 aa, synthetic construct
  REGION 1..9: note = Ab1105 CDR L3
QQYSGYQFT

SEQ ID NO: 614 - protein, 471 aa, synthetic construct
  REGION 1..471: note = Ab1106 HC Hole scFv-Fc
QVQLVQSGAEVKKPGASVKVSCKASGYTFTSYWMHWVRQHPGQGLEWMGMIHPNAGGTNYAQKFQGRVTMTRDTSTSTVYMELSSLRSEDTAVYYCAMGDYVSRDYWGQGTLVTVSSGGGGSGGGGSGGGGSEIVLTQSPGTLSLSPGERATLSCRASSSVSSSYLHWYQQKPGQAPRLLIYSTSSRATGIPDRFSGSGSGTDFTLTISRLEPEDFAVYYCQQYSGYQFTFGQGTKLEIKGGGGSDKTHTCPPCPAPEAAGGPSVFLFPPKPKDTLMISRTPEVTCVVVDVSHEDPEVKFNWYVDGVEVHNAKTKPREEQYNSTYRVVSVLTVLHQDWLNGKEYKCKVSNKALPAPIEKTISKAKGQPREPQVYTLPPSRDELTKNQVSLSCAVKGFYPSDIAVEWESNGQPENNYKTTPPVLDSDGSFFLVSKLTVDKSRWQQGNVFSCSVMHEALHNHYTQKSLSLSPG

SEQ ID NO: 615 - protein, 215 aa, synthetic construct; identical to SEQ ID NO: 516
  REGION 1..215: note = Ab1106 LC Knob

SEQ ID NO: 616 - protein, 445 aa, synthetic construct; identical to SEQ ID NO: 517
  REGION 1..445: note = Ab1106 HC Knob

SEQ ID NO: 617 - protein, 5 aa, synthetic construct
  REGION 1..5: note = Ab1106 CDR H1
SYWMH

SEQ ID NO: 618 - protein, 17 aa, synthetic construct
  REGION 1..17: note = Ab1106 CDR H2
MIHPNAGGTNYAQKFQG

SEQ ID NO: 619 - protein, 8 aa, synthetic construct
  REGION 1..8: note = Ab1106 CDR H3
GDYVSRDY

SEQ ID NO: 620 - protein, 12 aa, synthetic construct
  REGION 1..12: note = Ab1106 CDR L1
RASSSVSSSYLH

SEQ ID NO: 621 - protein, 7 aa, synthetic construct
  REGION 1..7: note = Ab1106 CDR L2
STSSRAT

SEQ ID NO: 622 - protein, 9 aa, synthetic construct
  REGION 1..9: note = Ab1106 CDR L3
QQYSGYQFT

SEQ ID NO: 623 - protein, 471 aa, synthetic construct
  REGION 1..471: note = Ab1107 HC Hole scFv-Fc
QVQLVQSGAEVKKPGASVKVSCKASGYTFTSYWMHWVRQHPGQGLEWMGMAHPNSGGTNYAQKFQGRVTMTRDTSTSTVYMELSSLRSEDTAVYYCAMGDYVSRDYWGQGTLVTVSSGGGGSGGGGSGGGGSEIVLTQSPGTLSLSPGERATLSCRASSSVSSSYLHWYQQKPGQAPRLLIYSTSSRATGIPDRFSGSGSGTDFTLTISRLEPEDFAVYYCQQYSGYQFTFGQGTKLEIKGGGGSDKTHTCPPCPAPEAAGGPSVFLFPPKPKDTLMISRTPEVTCVVVDVSHEDPEVKFNWYVDGVEVHNAKTKPREEQYNSTYRVVSVLTVLHQDWLNGKEYKCKVSNKALPAPIEKTISKAKGQPREPQVYTLPPSRDELTKNQVSLSCAVKGFYPSDIAVEWESNGQPENNYKTTPPVLDSDGSFFLVSKLTVDKSRWQQGNVFSCSVMHEALHNHYTQKSLSLSPG

SEQ ID NO: 624 - protein, 215 aa, synthetic construct; identical to SEQ ID NO: 516
  REGION 1..215: note = Ab1107 LC Knob

SEQ ID NO: 625 - protein, 445 aa, synthetic construct; identical to SEQ ID NO: 517
  REGION 1..445: note = Ab1107 HC Knob

SEQ ID NO: 626 - protein, 5 aa, synthetic construct
  REGION 1..5: note = Ab1107 CDR H1
SYWMH

SEQ ID NO: 627 - protein, 17 aa, synthetic construct
  REGION 1..17: note = Ab1107 CDR H2
MAHPNSGGTNYAQKFQG

SEQ ID NO: 628 - protein, 8 aa, synthetic construct
  REGION 1..8: note = Ab1107 CDR H3
GDYVSRDY

SEQ ID NO: 629 - protein, 12 aa, synthetic construct
  REGION 1..12: note = Ab1107 CDR L1
RASSSVSSSYLH

SEQ ID NO: 630 - protein, 7 aa, synthetic construct
  REGION 1..7: note = Ab1107 CDR L2
STSSRAT

SEQ ID NO: 631 - protein, 9 aa, synthetic construct
  REGION 1..9: note = Ab1107 CDR L3
QQYSGYQFT

SEQ ID NO: 632 - protein, 471 aa, synthetic construct
  REGION 1..471: note = Ab1108 HC Hole scFv-Fc
QVQLVQSGAEVKKPGASVKVSCKASGYTFTSYWMHWVRQHPGQGLEWMGMIHPNSAGTNYAQKFQGRVTMTRDTSTSTVYMELSSLRSEDTAVYYCAMGDYVSRDYWGQGTLVTVSSGGGGSGGGGSGGGGSEIVLTQSPGTLSLSPGERATLSCRASSSVSSSYLHWYQQKPGQAPRLLIYSTSSRATGIPDRFSGSGSGTDFTLTISRLEPEDFAVYYCQQYSGYQFTFGQGTKLEIKGGGGSDKTHTCPPCPAPEAAGGPSVFLFPPKPKDTLMISRTPEVTCVVVDVSHEDPEVKFNWYVDGVEVHNAKTKPREEQYNSTYRVVSVLTVLHQDWLNGKEYKCKVSNKALPAPIEKTISKAKGQPREPQVYTLPPSRDELTKNQVSLSCAVKGFYPSDIAVEWESNGQPENNYKTTPPVLDSDGSFFLVSKLTVDKSRWQQGNVFSCSVMHEALHNHYTQKSLSLSPG

SEQ ID NO: 633 - protein, 215 aa, synthetic construct; identical to SEQ ID NO: 516
  REGION 1..215: note = Ab1108 LC Knob

SEQ ID NO: 634 - protein, 445 aa, synthetic construct; identical to SEQ ID NO: 517
  REGION 1..445: note = Ab1108 HC Knob

SEQ ID NO: 635 - protein, 5 aa, synthetic construct
  REGION 1..5: note = Ab1108 CDR H1
SYWMH

SEQ ID NO: 636 - protein, 17 aa, synthetic construct
  REGION 1..17: note = Ab1108 CDR H2
MIHPNSAGTNYAQKFQG

SEQ ID NO: 637 - protein, 8 aa, synthetic construct
  REGION 1..8: note = Ab1108 CDR H3
GDYVSRDY

SEQ ID NO: 638 - protein, 12 aa, synthetic construct
  REGION 1..12: note = Ab1108 CDR L1
RASSSVSSSYLH

SEQ ID NO: 639 - protein, 7 aa, synthetic construct
  REGION 1..7: note = Ab1108 CDR L2
STSSRAT

SEQ ID NO: 640 - protein, 9 aa, synthetic construct
  REGION 1..9: note = Ab1108 CDR L3
QQYSGYQFT

SEQ ID NO: 641 - protein, 471 aa, synthetic construct
  REGION 1..471: note = Ab1109 HC Hole scFv-Fc
QVQLVQSGAEVKKPGASVKVSCKASGYTFTSYWMHWVRQHPGQGLEWMGMIHPNSGSTNYAQKFQGRVTMTRDTSTSTVYMELSSLRSEDTAVYYCAMGDYVSRDYWGQGTLVTVSSGGGGSGGGGSGGGGSEIVLTQSPGTLSLSPGERATLSCRASSSVSSSYLHWYQQKPGQAPRLLIYSTSSRATGIPDRFSGSGSGTDFTLTISRLEPEDFAVYYCQQYSGYQFTFGQGTKLEIKGGGGSDKTHTCPPCPAPEAAGGPSVFLFPPKPKDTLMISRTPEVTCVVVDVSHEDPEVKFNWYVDGVEVHNAKTKPREEQYNSTYRVVSVLTVLHQDWLNGKEYKCKVSNKALPAPIEKTISKAKGQPREPQVYTLPPSRDELTKNQVSLSCAVKGFYPSDIAVEWESNGQPENNYKTTPPVLDSDGSFFLVSKLTVDKSRWQQGNVFSCSVMHEALHNHYTQKSLSLSPG

SEQ ID NO: 642 - protein, 215 aa, synthetic construct; identical to SEQ ID NO: 516
  REGION 1..215: note = Ab1109 LC Knob

SEQ ID NO: 643 - protein, 445 aa, synthetic construct; identical to SEQ ID NO: 517
  REGION 1..445: note = Ab1109 HC Knob

SEQ ID NO: 644 - protein, 5 aa, synthetic construct
  REGION 1..5: note = Ab1109 CDR H1
SYWMH

SEQ ID NO: 645 - protein, 17 aa, synthetic construct
  REGION 1..17: note = Ab1109 CDR H2
MIHPNSGSTNYAQKFQG

SEQ ID NO: 646 - protein, 8 aa, synthetic construct
  REGION 1..8: note = Ab1109 CDR H3
GDYVSRDY

SEQ ID NO: 647 - protein, 12 aa, synthetic construct
  REGION 1..12: note = Ab1109 CDR L1
RASSSVSSSYLH

SEQ ID NO: 648 - protein, 7 aa, synthetic construct
  REGION 1..7: note = Ab1109 CDR L2
STSSRAT

SEQ ID NO: 649 - protein, 9 aa, synthetic construct
  REGION 1..9: note = Ab1109 CDR L3
QQYSGYQFT

SEQ ID NO: 650 - protein, 471 aa, synthetic construct
  REGION 1..471: note = Ab1110 HC Hole scFv-Fc
QVQLVQSGAEVKKPGASVKVSCKASGYTFTSYWMHWVRQHPGQGLEWMGMIHPNSGGANYAQKFQGRVTMTRDTSTSTVYMELSSLRSEDTAVYYCAMGDYVSRDYWGQGTLVTVSSGGGGSGGGGSGGGGSEIVLTQSPGTLSLSPGERATLSCRASSSVSSSYLHWYQQKPGQAPRLLIYSTSSRATGIPDRFSGSGSGTDFTLTISRLEPEDFAVYYCQQYSGYQFTFGQGTKLEIKGGGGSDKTHTCPPCPAPEAAGGPSVFLFPPKPKDTLMISRTPEVTCVVVDVSHEDPEVKFNWYVDGVEVHNAKTKPREEQYNSTYRVVSVLTVLHQDWLNGKEYKCKVSNKALPAPIEKTISKAKGQPREPQVYTLPPSRDELTKNQVSLSCAVKGFYPSDIAVEWESNGQPENNYKTTPPVLDSDGSFFLVSKLTVDKSRWQQGNVFSCSVMHEALHNHYTQKSLSLSPG

SEQ ID NO: 651 - protein, 215 aa, synthetic construct; identical to SEQ ID NO: 516
  REGION 1..215: note = Ab1110 LC Knob

SEQ ID NO: 652 - protein, 445 aa, synthetic construct; identical to SEQ ID NO: 517
  REGION 1..445: note = Ab1110 HC Knob

SEQ ID NO: 653 - protein, 5 aa, synthetic construct
  REGION 1..5: note = Ab1110 CDR H1
SYWMH

SEQ ID NO: 654 - protein, 17 aa, synthetic construct
  REGION 1..17: note = Ab1110 CDR H2
MIHPNSGGANYAQKFQG

SEQ ID NO: 655 - protein, 8 aa, synthetic construct
  REGION 1..8: note = Ab1110 CDR H3
GDYVSRDY

SEQ ID NO: 656 - protein, 12 aa, synthetic construct
  REGION 1..12: note = Ab1110 CDR L1
RASSSVSSSYLH

SEQ ID NO: 657 - protein, 7 aa, synthetic construct
  REGION 1..7: note = Ab1110 CDR L2
STSSRAT

SEQ ID NO: 658 - protein, 9 aa, synthetic construct
  REGION 1..9: note = Ab1110 CDR L3
QQYSGYQFT

SEQ ID NO: 659 - protein, 471 aa, synthetic construct
  REGION 1..471: note = Ab1111 HC Hole scFv-Fc
QVQLVQSGAEVKKPGASVKVSCKASGYTFTSYWMHWVRQHPGQGLEWMGMIHPNSGGTNYAQKFQGRVTMTRDTSTSTVYMELSSLRSEDTAVYYCAMADYVSRDYWGQGTLVTVSSGGGGSGGGGSGGGGSEIVLTQSPGTLSLSPGERATLSCRASSSVSSSYLHWYQQKPGQAPRLLIYSTSSRATGIPDRFSGSGSGTDFTLTISRLEPEDFAVYYCQQYSGYQFTFGQGTKLEIKGGGGSDKTHTCPPCPAPEAAGGPSVFLFPPKPKDTLMISRTPEVTCVVVDVSHEDPEVKFNWYVDGVEVHNAKTKPREEQYNSTYRVVSVLTVLHQDWLNGKEYKCKVSNKALPAPIEKTISKAKGQPREPQVYTLPPSRDELTKNQVSLSCAVKGFYPSDIAVEWESNGQPENNYKTTPPVLDSDGSFFLVSKLTVDKSRWQQGNVFSCSVMHEALHNHYTQKSLSLSPG

SEQ ID NO: 660 - protein, 215 aa, synthetic construct; identical to SEQ ID NO: 516
  REGION 1..215: note = Ab1111 LC Knob

SEQ ID NO: 661 - protein, 445 aa, synthetic construct; identical to SEQ ID NO: 517
  REGION 1..445: note = Ab1111 HC Knob

SEQ ID NO: 662 - protein, 5 aa, synthetic construct
  REGION 1..5: note = Ab1111 CDR H1
SYWMH

SEQ ID NO: 663 - protein, 17 aa, synthetic construct
  REGION 1..17: note = Ab1111 CDR H2
MIHPNSGGTNYAQKFQG

SEQ ID NO: 664 - protein, 8 aa, synthetic construct
  REGION 1..8: note = Ab1111 CDR H3
ADYVSRDY

SEQ ID NO: 665 - protein, 12 aa, synthetic construct
  REGION 1..12: note = Ab1111 CDR L1
RASSSVSSSYLH

SEQ ID NO: 666 - protein, 7 aa, synthetic construct
  REGION 1..7: note = Ab1111 CDR L2
STSSRAT

SEQ ID NO: 667 - protein, 9 aa, synthetic construct
  REGION 1..9: note = Ab1111 CDR L3
QQYSGYQFT

SEQ ID NO: 668 - protein, 471 aa, synthetic construct
  REGION 1..471: note = Ab1112 HC Hole scFv-Fc
QVQLVQSGAEVKKPGASVKVSCKASGYTFTSYWMHWVRQHPGQGLEWMGMIHPNSGGTNYAQKFQGRVTMTRDTSTSTVYMELSSLRSEDTAVYYCAMGAYVSRDYWGQGTLVTVSSGGGGSGGGGSGGGGSEIVLTQSPGTLSLSPGERATLSCRASSSVSSSYLHWYQQKPGQAPRLLIYSTSSRATGIPDRFSGSGSGTDFTLTISRLEPEDFAVYYCQQYSGYQFTFGQGTKLEIKGGGGSDKTHTCPPCPAPEAAGGPSVFLFPPKPKDTLMISRTPEVTCVVVDVSHEDPEVKFNWYVDGVEVHNAKTKPREEQYNSTYRVVSVLTVLHQDWLNGKEYKCKVSNKALPAPIEKTISKAKGQPREPQVYTLPPSRDELTKNQVSLSCAVKGFYPSDIAVEWESNGQPENNYKTTPPVLDSDGSFFLVSKLTVDKSRWQQGNVFSCSVMHEALHNHYTQKSLSLSPG

SEQ ID NO: 669 - protein, 214 aa, synthetic construct
  REGION 1..214: note = Ab1112 LC Knob
DIQMTQSPSSLSASVGDRVTITCSASSSVSSGNFHWYQQKPGKAPKLLIYRTSNLASGVPSRFSGSGSGTDYTLTISSLQPEDFATYYCQQWSGYPYTFGQGTKVEIKRTVAAPSVFIFPPSDEQLKSGTASVVCLLNNFYPREAKVQWKVDNALQSGNSQESVTEQDSKDSTYSLSSTLTLSKADYEKHKVYACEVTHQGLSSPVTKSFNRGE

SEQ ID NO: 670 - protein, 445 aa, synthetic construct; identical to SEQ ID NO: 517
  REGION 1..445: note = Ab1112 HC Knob

SEQ ID NO: 671 - protein, 5 aa, synthetic construct
  REGION 1..5: note = Ab1112 CDR H1
SYWMH

SEQ ID NO: 672 - protein, 17 aa, synthetic construct
  REGION 1..17: note = Ab1112 CDR H2
MIHPNSGGTNYAQKFQG

SEQ ID NO: 673 - protein, 8 aa, synthetic construct
  REGION 1..8: note = Ab1112 CDR H3
GAYVSRDY

SEQ ID NO: 674 - protein, 12 aa, synthetic construct
  REGION 1..12: note = Ab1112 CDR L1
RASSSVSSSYLH

SEQ ID NO: 675 - protein, 7 aa, synthetic construct
  REGION 1..7: note = Ab1112 CDR L2
STSSRAT

SEQ ID NO: 676 - protein, 9 aa, synthetic construct
  REGION 1..9: note = Ab1112 CDR L3
QQYSGYQFT

SEQ ID NO: 677 - protein, 471 aa, synthetic construct
  REGION 1..471: note = Ab1113 HC Hole scFv-Fc
QVQLVQSGAEVKKPGASVKVSCKASGYTFTSYWMHWVRQHPGQGLEWMGMIHPNSGGTNYAQKFQGRVTMTRDTSTSTVYMELSSLRSEDTAVYYCAMGDAVSRDYWGQGTLVTVSSGGGGSGGGGSGGGGSEIVLTQSPGTLSLSPGERATLSCRASSSVSSSYLHWYQQKPGQAPRLLIYSTSSRATGIPDRFSGSGSGTDFTLTISRLEPEDFAVYYCQQYSGYQFTFGQGTKLEIKGGGGSDKTHTCPPCPAPEAAGGPSVFLFPPKPKDTLMISRTPEVTCVVVDVSHEDPEVKFNWYVDGVEVHNAKTKPREEQYNSTYRVVSVLTVLHQDWLNGKEYKCKVSNKALPAPIEKTISKAKGQPREPQVYTLPPSRDELTKNQVSLSCAVKGFYPSDIAVEWESNGQPENNYKTTPPVLDSDGSFFLVSKLTVDKSRWQQGNVFSCSVMHEALHNHYTQKSLSLSPG

SEQ ID NO: 678 - protein, 215 aa, synthetic construct; identical to SEQ ID NO: 516
  REGION 1..215: note = Ab1113 LC Knob

SEQ ID NO: 679 - protein, 445 aa, synthetic construct; identical to SEQ ID NO: 517
  REGION 1..445: note = Ab1113 HC Knob

SEQ ID NO: 680 - protein, 5 aa, synthetic construct
  REGION 1..5: note = Ab1113 CDR H1
SYWMH

SEQ ID NO: 681 - protein, 17 aa, synthetic construct
  REGION 1..17: note = Ab1113 CDR H2
MIHPNSGGTNYAQKFQG

SEQ ID NO: 682 - protein, 8 aa, synthetic construct
  REGION 1..8: note = Ab1113 CDR H3
GDAVSRDY

SEQ ID NO: 683 - protein, 12 aa, synthetic construct
  REGION 1..12: note = Ab1113 CDR L1
RASSSVSSSYLH

SEQ ID NO: 684 - protein, 7 aa, synthetic construct
  REGION 1..7: note = Ab1113 CDR L2
STSSRAT

SEQ ID NO: 685 - protein, 9 aa, synthetic construct
  REGION 1..9: note = Ab1113 CDR L3
QQYSGYQFT

SEQ ID NO: 686 - protein, 471 aa, synthetic construct
  REGION 1..471: note = Ab1114 HC Hole scFv-Fc
QVQLVQSGAEVKKPGASVKVSCKASGYTFTSYWMHWVRQHPGQGLEWMGMIHPNSGGTNYAQKFQGRVTMTRDTSTSTVYMELSSLRSEDTAVYYCAMGDYASRDYWGQGTLVTVSSGGGGSGGGGSGGGGSEIVLTQSPGTLSLSPGERATLSCRASSSVSSSYLHWYQQKPGQAPRLLIYSTSSRATGIPDRFSGSGSGTDFTLTISRLEPEDFAVYYCQQYSGYQFTFGQGTKLEIKGGGGSDKTHTCPPCPAPEAAGGPSVFLFPPKPKDTLMISRTPEVTCVVVDVSHEDPEVKFNWYVDGVEVHNAKTKPREEQYNSTYRVVSVLTVLHQDWLNGKEYKCKVSNKALPAPIEKTISKAKGQPREPQVYTLPPSRDELTKNQVSLSCAVKGFYPSDIAVEWESNGQPENNYKTTPPVLDSDGSFFLVSKLTVDKSRWQQGNVFSCSVMHEALHNHYTQKSLSLSPG

SEQ ID NO: 687 - protein, 215 aa, synthetic construct; identical to SEQ ID NO: 516
  REGION 1..215: note = Ab1114 LC Knob

SEQ ID NO: 688 - protein, 445 aa, synthetic construct; identical to SEQ ID NO: 517
  REGION 1..445: note = Ab1114 HC Knob

SEQ ID NO: 689 - protein, 5 aa, synthetic construct
  REGION 1..5: note = Ab1114 CDR H1
SYWMH

SEQ ID NO: 690 - protein, 17 aa, synthetic construct
  REGION 1..17: note = Ab1114 CDR H2
MIHPNSGGTNYAQKFQG

SEQ ID NO: 691 - protein, 8 aa, synthetic construct
  REGION 1..8: note = Ab1114 CDR H3
GDYASRDY

SEQ ID NO: 692 - protein, 12 aa, synthetic construct
  REGION 1..12: note = Ab1114 CDR L1
RASSSVSSSYLH

SEQ ID NO: 693 - protein, 7 aa, synthetic construct
  REGION 1..7: note = Ab1114 CDR L2
STSSRAT

SEQ ID NO: 694 - protein, 9 aa, synthetic construct
  REGION 1..9: note = Ab1114 CDR L3
QQYSGYQFT

SEQ ID NO: 695 - protein, 471 aa, synthetic construct
  REGION 1..471: note = Ab1115 HC Hole scFv-Fc
QVQLVQSGAEVKKPGASVKVSCKASGYTFTSYWMHWVRQHPGQGLEWMGMIHPNSGGTNYAQKFQGRVTMTRDTSTSTVYMELSSLRSEDTAVYYCAMGDYVARDYWGQGTLVTVSSGGGGSGGGGSGGGGSEIVLTQSPGTLSLSPGERATLSCRASSSVSSSYLHWYQQKPGQAPRLLIYSTSSRATGIPDRFSGSGSGTDFTLTISRLEPEDFAVYYCQQYSGYQFTFGQGTKLEIKGGGGSDKTHTCPPCPAPEAAGGPSVFLFPPKPKDTLMISRTPEVTCVVVDVSHEDPEVKFNWYVDGVEVHNAKTKPREEQYNSTYRVVSVLTVLHQDWLNGKEYKCKVSNKALPAPIEKTISKAKGQPREPQVYTLPPSRDELTKNQVSLSCAVKGFYPSDIAVEWESNGQPENNYKTTPPVLDSDGSFFLVSKLTVDKSRWQQGNVFSCSVMHEALHNHYTQKSLSLSPG

SEQ ID NO: 696 - protein, 215 aa, synthetic construct; identical to SEQ ID NO: 516
  REGION 1..215: note = Ab1115 LC Knob

SEQ ID NO: 697 - protein, 445 aa, synthetic construct; identical to SEQ ID NO: 517
  REGION 1..445: note = Ab1115 HC Knob

SEQ ID NO: 698 - protein, 5 aa, synthetic construct
  REGION 1..5: note = Ab1115 CDR H1
SYWMH

SEQ ID NO: 699 - protein, 17 aa, synthetic construct
  REGION 1..17: note = Ab1115 CDR H2
MIHPNSGGTNYAQKFQG

SEQ ID NO: 700 - protein, 8 aa, synthetic construct
  REGION 1..8: note = Ab1115 CDR H3
GDYVARDY

SEQ ID NO: 701 - protein, 12 aa, synthetic construct
  REGION 1..12: note = Ab1115 CDR L1
RASSSVSSSYLH

SEQ ID NO: 702 - protein, 7 aa, synthetic construct
  REGION 1..7: note = Ab1115 CDR L2
STSSRAT

SEQ ID NO: 703 - protein, 9 aa, synthetic construct
  REGION 1..9: note = Ab1115 CDR L3
QQYSGYQFT

SEQ ID NO: 704 - protein, 471 aa, synthetic construct
  REGION 1..471: note = Ab1116 HC Hole scFv-Fc
QVQLVQSGAEVKKPGASVKVSCKASGYTFTSYWMHWVRQHPGQGLEWMGMIHPNSGGTNYAQKFQGRVTMTRDTSTSTVYMELSSLRSEDTAVYYCAMGDYVSRAYWGQGTLVTVSSGGGGSGGGGSGGGGSEIVLTQSPGTLSLSPGERATLSCRASSSVSSSYLHWYQQKPGQAPRLLIYSTSSRATGIPDRFSGSGSGTDFTLTISRLEPEDFAVYYCQQYSGYQFTFGQGTKLEIKGGGGSDKTHTCPPCPAPEAAGGPSVFLFPPKPKDTLMISRTPEVTCVVVDVSHEDPEVKFNWYVDGVEVHNAKTKPREEQYNSTYRVVSVLTVLHQDWLNGKEYKCKVSNKALPAPIEKTISKAKGQPREPQVYTLPPSRDELTKNQVSLSCAVKGFYPSDIAVEWESNGQPENNYKTTPPVLDSDGSFFLVSKLTVDKSRWQQGNVFSCSVMHEALHNHYTQKSLSLSPG

SEQ ID NO: 705 - protein, 215 aa, synthetic construct; identical to SEQ ID NO: 516
  REGION 1..215: note = Ab1116 LC Knob

SEQ ID NO: 706 - protein, 445 aa, synthetic construct; identical to SEQ ID NO: 517
  REGION 1..445: note = Ab1116 HC Knob

SEQ ID NO: 707 - protein, 5 aa, synthetic construct
  REGION 1..5: note = Ab1116 CDR H1
SYWMH

SEQ ID NO: 708 - protein, 17 aa, synthetic construct
  REGION 1..17: note = Ab1116 CDR H2
MIHPNSGGTNYAQKFQG

SEQ ID NO: 709 - protein, 8 aa, synthetic construct
  REGION 1..8: note = Ab1116 CDR H3
GDYVSRAY

SEQ ID NO: 710 - protein, 12 aa, synthetic construct
  REGION 1..12: note = Ab1116 CDR L1
RASSSVSSSYLH

SEQ ID NO: 711 - protein, 7 aa, synthetic construct
  REGION 1..7: note = Ab1116 CDR L2
STSSRAT

SEQ ID NO: 712 - protein, 9 aa, synthetic construct
  REGION 1..9: note = Ab1116 CDR L3
QQYSGYQFT

SEQ ID NO: 713 - protein, 471 aa, synthetic construct
  REGION 1..471: note = Ab1117 HC Hole scFv-Fc
QVQLVQSGAEVKKPGASVKVSCKASGYTFTSYWMHWVRQHPGQGLEWMGMIHPNSGGTNYAQKFQGRVTMTRDTSTSTVYMELSSLRSEDTAVYYCAMGDYVSRDAWGQGTLVTVSSGGGGSGGGGSGGGGSEIVLTQSPGTLSLSPGERATLSCRASSSVSSSYLHWYQQKPGQAPRLLIYSTSSRATGIPDRFSGSGSGTDFTLTISRLEPEDFAVYYCQQYSGYQFTFGQGTKLEIKGGGGSDKTHTCPPCPAPEAAGGPSVFLFPPKPKDTLMISRTPEVTCVVVDVSHEDPEVKFNWYVDGVEVHNAKTKPREEQYNSTYRVVSVLTVLHQDWLNGKEYKCKVSNKALPAPIEKTISKAKGQPREPQVYTLPPSRDELTKNQVSLSCAVKGFYPSDIAVEWESNGQPENNYKTTPPVLDSDGSFFLVSKLTVDKSRWQQGNVFSCSVMHEALHNHYTQKSLSLSPG

SEQ ID NO: 714 - protein, 215 aa, synthetic construct; identical to SEQ ID NO: 516
  REGION 1..215: note = Ab1117 LC Knob

SEQ ID NO: 715 - protein, 445 aa, synthetic construct; identical to SEQ ID NO: 517
  REGION 1..445: note = Ab1117 HC Knob

SEQ ID NO: 716 - protein, 5 aa, synthetic construct
  REGION 1..5: note = Ab1117 CDR H1
SYWMH

SEQ ID NO: 717 - protein, 17 aa, synthetic construct
  REGION 1..17: note = Ab1117 CDR H2
MIHPNSGGTNYAQKFQG

SEQ ID NO: 718 - protein, 8 aa, synthetic construct
  REGION 1..8: note = Ab1117 CDR H3
GDYVSRDA

SEQ ID NO: 719 - protein, 12 aa, synthetic construct
  REGION 1..12: note = Ab1117 CDR L1
RASSSVSSSYLH

SEQ ID NO: 720 - protein, 7 aa, synthetic construct
  REGION 1..7: note = Ab1117 CDR L2
STSSRAT

SEQ ID NO: 721 - protein, 9 aa, synthetic construct
  REGION 1..9: note = Ab1117 CDR L3
QQYSGYQFT

SEQ ID NO: 722 - protein, 471 aa, synthetic construct
  REGION 1..471: note = Ab1118 HC Hole scFv-Fc
QVQLVQSGAEVKKPGASVKVSCKASGYTFTAYWMHWVRQHPGQGLEWMGMIHPNSGGTNYAQKFQGRVTMTRDTSTSTVYMELSSLRSEDTAVYYCAMGDYVSRDYWGQGTLVTVSSGGGGSGGGGSGGGGSEIVLTQSPGTLSLSPGERATLSCRASSSVSSSYLHWYQQKPGQAPRLLIYSTSSRATGIPDRFSGSGSGTDFTLTISRLEPEDFAVYYCQQYSGYQFTFGQGTKLEIKGGGGSDKTHTCPPCPAPEAAGGPSVFLFPPKPKDTLMISRTPEVTCVVVDVSHEDPEVKFNWYVDGVEVHNAKTKPREEQYNSTYRVVSVLTVLHQDWLNGKEYKCKVSNKALPAPIEKTISKAKGQPREPQVYTLPPSRDELTKNQVSLSCAVKGFYPSDIAVEWESNGQPENNYKTTPPVLDSDGSFFLVSKLTVDKSRWQQGNVFSCSVMHEALHNHYTQKSLSLSPG

SEQ ID NO: 723 - protein, 215 aa, synthetic construct; identical to SEQ ID NO: 516
  REGION 1..215: note = Ab1118 LC Knob

SEQ ID NO: 724 - protein, 445 aa, synthetic construct; identical to SEQ ID NO: 517
  REGION 1..445: note = Ab1118 HC Knob

SEQ ID NO: 725 - protein, 5 aa, synthetic construct
  REGION 1..5: note = Ab1118 CDR H1
AYWMH

SEQ ID NO: 726 - protein, 17 aa, synthetic construct
  REGION 1..17: note = Ab1118 CDR H2
MIHPNSGGTNYAQKFQG

SEQ ID NO: 727 - protein, 8 aa, synthetic construct
  REGION 1..8: note = Ab1118 CDR H3
GDYVSRDY

SEQ ID NO: 728 - protein, 12 aa, synthetic construct
  REGION 1..12: note = Ab1118 CDR L1
RASSSVSSSYLH

SEQ ID NO: 729 - protein, 7 aa, synthetic construct
  REGION 1..7: note = Ab1118 CDR L2
STSSRAT

SEQ ID NO: 730 - protein, 9 aa, synthetic construct
  REGION 1..9: note = Ab1118 CDR L3
QQYSGYQFT

SEQ ID NO: 731 - protein, 471 aa, synthetic construct
  REGION 1..471: note = Ab1119 HC Hole scFv-Fc
QVQLVQSGAEVKKPGASVKVSCKASGYTFTSAWMHWVRQHPGQGLEWMGMIHPNSGGTNYAQKFQGRVTMTRDTSTSTVYMELSSLRSEDTAVYYCAMGDYVSRDYWGQGTLVTVSSGGGGSGGGGSGGGGSEIVLTQSPGTLSLSPGERATLSCRASSSVSSSYLHWYQQKPGQAPRLLIYSTSSRATGIPDRFSGSGSGTDFTLTISRLEPEDFAVYYCQQYSGYQFTFGQGTKLEIKGGGGSDKTHTCPPCPAPEAAGGPSVFLFPPKPKDTLMISRTPEVTCVVVDVSHEDPEVKFNWYVDGVEVHNAKTKPREEQYNSTYRVVSVLTVLHQDWLNGKEYKCKVSNKALPAPIEKTISKAKGQPREPQVYTLPPSRDELTKNQVSLSCAVKGFYPSDIAVEWESNGQPENNYKTTPPVLDSDGSFFLVSKLTVDKSRWQQGNVFSCSVMHEALHNHYTQKSLSLSPG

SEQ ID NO: 732 - protein, 215 aa, synthetic construct; identical to SEQ ID NO: 516
  REGION 1..215: note = Ab1119 LC Knob

SEQ ID NO: 733 - protein, 445 aa, synthetic construct; identical to SEQ ID NO: 517
  REGION 1..445: note = Ab1119 HC Knob

SEQ ID NO: 734 - protein, 5 aa, synthetic construct
  REGION 1..5: note = Ab1119 CDR H1
SAWMH

SEQ ID NO: 735 - protein, 17 aa, synthetic construct
  REGION 1..17: note = Ab1119 CDR H2
MIHPNSGGTNYAQKFQG

SEQ ID NO: 736 - protein, 8 aa, synthetic construct
  REGION 1..8: note = Ab1119 CDR H3
GDYVSRDY

SEQ ID NO: 737 - protein, 12 aa, synthetic construct
  REGION 1..12: note = Ab1119 CDR L1
RASSSVSSSYLH

SEQ ID NO: 738 - protein, 7 aa, synthetic construct
  REGION 1..7: note = Ab1119 CDR L2
STSSRAT

SEQ ID NO: 739 - protein, 9 aa, synthetic construct
  REGION 1..9: note = Ab1119 CDR L3
QQYSGYQFT

SEQ ID NO: 740 - protein, 471 aa, synthetic construct
  REGION 1..471: note = Ab1120 HC Hole scFv-Fc
QVQLVQSGAEVQKPGASVKVSCKASGYTFTSYWMHWVRQHPGQGLEWMGMIHPNSGGTNYAQKFQGRVTMTRDTSTSTVYMELSSLRSEDTAVYYCAMGDYVSRDYWGQGTLVTVSSGGGGSGGGGSGGGGSEIVLTQSPGTLSLSPGERATLSCRASSSVSSSYLHWYQQKPGQAPRLLIYSTSSRATGIPDRFSGSGSGTDFTLTISRLEPEDFAVYYCQQYSGYQFTFGQGTKLEIKGGGGSDKTHTCPPCPAPEAAGGPSVFLFPPKPKDTLMISRTPEVTCVVVDVSHEDPEVKFNWYVDGVEVHNAKTKPREEQYNSTYRVVSVLTVLHQDWLNGKEYKCKVSNKALPAPIEKTISKAKGQPREPQVYTLPPSRDELTKNQVSLSCAVKGFYPSDIAVEWESNGQPENNYKTTPPVLDSDGSFFLVSKLTVDKSRWQQGNVFSCSVMHEALHNHYTQKSLSLSPG

SEQ ID NO: 741 - protein, 215 aa, synthetic construct; identical to SEQ ID NO: 516
  REGION 1..215: note = Ab1120 LC Knob

SEQ ID NO: 742 - protein, 445 aa, synthetic construct; identical to SEQ ID NO: 517
  REGION 1..445: note = Ab1120 HC Knob

SEQ ID NO: 743 - protein, 5 aa, synthetic construct
  REGION 1..5: note = Ab1120 CDR H1
SYWMH

SEQ ID NO: 744 - protein, 17 aa, synthetic construct
  REGION 1..17: note = Ab1120 CDR H2
MIHPNSGGTNYAQKFQG

SEQ ID NO: 745 - protein, 8 aa, synthetic construct
  REGION 1..8: note = Ab1120 CDR H3
GDYVSRDY

SEQ ID NO: 746 - protein, 12 aa, synthetic construct
  REGION 1..12: note = Ab1120 CDR L1
RASSSVSSSYLH

SEQ ID NO: 747 - protein, 7 aa, synthetic construct
  REGION 1..7: note = Ab1120 CDR L2
STSSRAT

SEQ ID NO: 748 - protein, 9 aa, synthetic construct
  REGION 1..9: note = Ab1120 CDR L3
QQYSGYQFT

SEQ ID NO: 749 - protein, 471 aa, synthetic construct
  REGION 1..471: note = Ab1121 HC Hole scFv-Fc
QVQLVQSGAEVKKPGASVKVSCIASGYTFTSYWMHWVRQHPGQGLEWMGMIHPNSGGTNYAQKFQGRVTMTRDTSTSTVYMELSSLRSEDTAVYYCAMGDYVSRDYWGQGTLVTVSSGGGGSGGGGSGGGGSEIVLTQSPGTLSLSPGERATLSCRASSSVSSSYLHWYQQKPGQAPRLLIYSTSSRATGIPDRFSGSGSGTDFTLTISRLEPEDFAVYYCQQYSGYQFTFGQGTKLEIKGGGGSDKTHTCPPCPAPEAAGGPSVFLFPPKPKDTLMISRTPEVTCVVVDVSHEDPEVKFNWYVDGVEVHNAKTKPREEQYNSTYRVVSVLTVLHQDWLNGKEYKCKVSNKALPAPIEKTISKAKGQPREPQVYTLPPSRDELTKNQVSLSCAVKGFYPSDIAVEWESNGQPENNYKTTPPVLDSDGSFFLVSKLTVDKSRWQQGNVFSCSVMHEALHNHYTQKSLSLSPG

SEQ ID NO: 750 - protein, 215 aa, synthetic construct; identical to SEQ ID NO: 516
  REGION 1..215: note = Ab1121 LC Knob

SEQ ID NO: 751 - protein, 445 aa, synthetic construct; identical to SEQ ID NO: 517
  REGION 1..445: note = Ab1121 HC Knob

SEQ ID NO: 752 - protein, 5 aa, synthetic construct
  REGION 1..5: note = Ab1121 CDR H1
SYWMH

SEQ ID NO: 753 - protein, 17 aa, synthetic construct
  REGION 1..17: note = Ab1121 CDR H2
MIHPNSGGTNYAQKFQG

SEQ ID NO: 754 - protein, 8 aa, synthetic construct
  REGION 1..8: note = Ab1121 CDR H3
GDYVSRDY

SEQ ID NO: 755 - protein, 12 aa, synthetic construct
  REGION 1..12: note = Ab1121 CDR L1
RASSSVSSSYLH

SEQ ID NO: 756 - protein, 7 aa, synthetic construct
  REGION 1..7: note = Ab1121 CDR L2
STSSRAT

SEQ ID NO: 757 - protein, 9 aa, synthetic construct
  REGION 1..9: note = Ab1121 CDR L3
QQYSGYQFT

SEQ ID NO: 758 - protein, 471 aa, synthetic construct
  REGION 1..471: note = Ab1122 HC Hole scFv-Fc
QVQLVQSGAEVKKPGASVKVSCKASGYTFTSYWMHWVRQHPGQGLEWMGMIHPNSGGTNYAQKFQGRVTMTRDTSTSTVYMELSSLRSEDTAVYYCAMGDYVSRLYWGQGTLVTVSSGGGGSGGGGSGGGGSEIVLTQSPGTLSLSPGERATLSCRASSSVSSSYLHWYQQKPGQAPRLLIYSTSSRATGIPDRFSGSGSGTDFTLTISRLEPEDFAVYYCQQYSGYQFTFGQGTKLEIKGGGGSDKTHTCPPCPAPEAAGGPSVFLFPPKPKDTLMISRTPEVTCVVVDVSHEDPEVKFNWYVDGVEVHNAKTKPREEQYNSTYRVVSVLTVLHQDWLNGKEYKCKVSNKALPAPIEKTISKAKGQPREPQVYTLPPSRDELTKNQVSLSCAVKGFYPSDIAVEWESNGQPENNYKTTPPVLDSDGSFFLVSKLTVDKSRWQQGNVFSCSVMHEALHNHYTQKSLSLSPG

SEQ ID NO: 759 - protein, 215 aa, synthetic construct; identical to SEQ ID NO: 516
  REGION 1..215: note = Ab1122 LC Knob

SEQ ID NO: 760 - protein, 445 aa, synthetic construct; identical to SEQ ID NO: 517
  REGION 1..445: note = Ab1122 HC Knob

SEQ ID NO: 761 - protein, 5 aa, synthetic construct
  REGION 1..5: note = Ab1122 CDR H1
SYWMH

SEQ ID NO: 762 - protein, 17 aa, synthetic construct
  REGION 1..17: note = Ab1122 CDR H2
MIHPNSGGTNYAQKFQG

SEQ ID NO: 763 - protein, 8 aa, synthetic construct
  REGION 1..8: note = Ab1122 CDR H3
GDYVSRLY

SEQ ID NO: 764 - protein, 12 aa, synthetic construct
  REGION 1..12: note = Ab1122 CDR L1
RASSSVSSSYLH

SEQ ID NO: 765 - protein, 7 aa, synthetic construct
  REGION 1..7: note = Ab1122 CDR H2
STSSRAT

SEQ ID NO: 766 - protein, 9 aa, synthetic construct
  REGION 1..9: note = Ab1122 CDR L3
QQYSGYQFT

SEQ ID NO: 767 - protein, 471 aa, synthetic construct
  REGION 1..471: note = Ab1123 HC Hole scFv-Fc
QVQLVQSGAEVKKPGASVKVSCKASGYTFTSYWMHWVRQHPGQGLEWMGMIHPNSGGTNYAQKFQGRVQMTRDTSTSTVYMELSSLRSEDTAVYYCAMGDYVSRDYWGQGTLVTVSSGGGGSGGGGSGGGGSEIVLTQSPGTLSLSPGERATLSCRASSSVSSSYLHWYQQKPGQAPRLLIYSTSSRATGIPDRFSGSGSGTDFTLTISRLEPEDFAVYYCQQYSGYQFTFGQGTKLEIKGGGGSDKTHTCPPCPAPEAAGGPSVFLFPPKPKDTLMISRTPEVTCVVVDVSHEDPEVKFNWYVDGVEVHNAKTKPREEQYNSTYRVVSVLTVLHQDWLNGKEYKCKVSNKALPAPIEKTISKAKGQPREPQVYTLPPSRDELTKNQVSLSCAVKGFYPSDIAVEWESNGQPENNYKTTPPVLDSDGSFFLVSKLTVDKSRWQQGNVFSCSVMHEALHNHYTQKSLSLSPG

SEQ ID NO: 768 - protein, 215 aa, synthetic construct; identical to SEQ ID NO: 516
  REGION 1..215: note = Ab1123 LC Knob

SEQ ID NO: 769 - protein, 445 aa, synthetic construct; identical to SEQ ID NO: 517
  REGION 1..445: note = Ab1123 HC Knob

SEQ ID NO: 770 - protein, 5 aa, synthetic construct
  REGION 1..5: note = Ab1123 CDR H1
SYWMH

SEQ ID NO: 771 - protein, 17 aa, synthetic construct
  REGION 1..17: note = Ab1123 CDR H2
MIHPNSGGTNYAQKFQG

SEQ ID NO: 772 - protein, 8 aa, synthetic construct
  REGION 1..8: note = Ab1123 CDR H3
GDYVSRDY

SEQ ID NO: 773 - protein, 12 aa, synthetic construct
  REGION 1..12: note = Ab1123 CDR L1
RASSSVSSSYLH

SEQ ID NO: 774 - protein, 7 aa, synthetic construct
  REGION 1..7: note = Ab1123 CDR L2
STSSRAT

SEQ ID NO: 775 - protein, 9 aa, synthetic construct
  REGION 1..9: note = Ab1123 CDR L3
QQYSGYQFT

SEQ ID NO: 776 - protein, 471 aa, synthetic construct
  REGION 1..471: note = Ab1124 HC Hole scFv-Fc
QVQLVQSGAEVKKPGASVKVSCKASGYTFTSYWMHWVRQHPGQGLEWMGMIHPNSGGTNYAQKFQGRVTMTRDTSTSTVYMELSSLRSEDTAVYYCAMGDYVSRDYWGQGTLVTVSSGGGGSGGGGSGGGGSEIVLTQSPGTLSLSPGERATLSCRASSSVSSSYLHWYQQKPGQAPRLLIYSTSSRATGIPDRFSGSGSGTDFTLTISRLEPEDFAVYYCQQASGYQFTFGQGTKLEIKGGGGSDKTHTCPPCPAPEAAGGPSVFLFPPKPKDTLMISRTPEVTCVVVDVSHEDPEVKFNWYVDGVEVHNAKTKPREEQYNSTYRVVSVLTVLHQDWLNGKEYKCKVSNKALPAPIEKTISKAKGQPREPQVYTLPPSRDELTKNQVSLSCAVKGFYPSDIAVEWESNGQPENNYKTTPPVLDSDGSFFLVSKLTVDKSRWQQGNVFSCSVMHEALHNHYTQKSLSLSPG

SEQ ID NO: 777 - protein, 215 aa, synthetic construct; identical to SEQ ID NO: 516
  REGION 1..215: note = Ab1124 LC Knob

SEQ ID NO: 778 - protein, 445 aa, synthetic construct; identical to SEQ ID NO: 517
  REGION 1..445: note = Ab1124 HC Knob

SEQ ID NO: 779 - protein, 5 aa, synthetic construct
  REGION 1..5: note = Ab1124 CDR H1
SYWMH

SEQ ID NO: 780 - protein, 17 aa, synthetic construct
  REGION 1..17: note = Ab1124 CDR H2
MIHPNSGGTNYAQKFQG

SEQ ID NO: 781 - protein, 8 aa, synthetic construct
  REGION 1..8: note = Ab1124 CDR H3
GDYVSRDY

SEQ ID NO: 782 - protein, 12 aa, synthetic construct
  REGION 1..12: note = Ab1124 CDR L1
RASSSVSSSYLH

SEQ ID NO: 783 - protein, 7 aa, synthetic construct
  REGION 1..7: note = Ab1124 CDR L2
STSSRAT

SEQ ID NO: 784 - protein, 9 aa, synthetic construct
  REGION 1..9: note = Ab1124 CDR L3
QQASGYQFT

SEQ ID NO: 785 - protein, 471 aa, synthetic construct
  REGION 1..471: note = Ab1125 HC Hole scFv-Fc
QVQLVQSGAEVKKPGASVKVSCKASGYTFTSYWMHWVRQHPGQGLEWMGMIHPNSGGTNYAQKFQGRVTMTRDTSTSTVYMELSSLRSEDTAVYYCAMGDYVSRDYWGQGTLVTVSSGGGGSGGGGSGGGGSEIVLTQSPGTLSLSPGERATLSCRASSSVSSSYLHWYQQKPGQAPRLLIYSTSSRATGIPDRFSGSGSGTDFTLTISRLEPEDFAVYYCQQFSGYQFTFGQGTKLEIKGGGGSDKTHTCPPCPAPEAAGGPSVFLFPPKPKDTLMISRTPEVTCVVVDVSHEDPEVKFNWYVDGVEVHNAKTKPREEQYNSTYRVVSVLTVLHQDWLNGKEYKCKVSNKALPAPIEKTISKAKGQPREPQVYTLPPSRDELTKNQVSLSCAVKGFYPSDIAVEWESNGQPENNYKTTPPVLDSDGSFFLVSKLTVDKSRWQQGNVFSCSVMHEALHNHYTQKSLSLSPG

SEQ ID NO: 786 - protein, 215 aa, synthetic construct; identical to SEQ ID NO: 516
  REGION 1..215: note = Ab1125 LC Knob

SEQ ID NO: 787 - protein, 445 aa, synthetic construct; identical to SEQ ID NO: 517
  REGION 1..445: note = Ab1125 HC Knob

SEQ ID NO: 788 - protein, 5 aa, synthetic construct
  REGION 1..5: note = Ab1125 CDR H1
SYWMH

SEQ ID NO: 789 - protein, 17 aa, synthetic construct
  REGION 1..17: note = Ab1125 CDR H2
MIHPNSGGTNYAQKFQG

SEQ ID NO: 790 - protein, 8 aa, synthetic construct
  REGION 1..8: note = Ab1125 CDR H3
GDYVSRDY

SEQ ID NO: 791 - protein, 12 aa, synthetic construct
  REGION 1..12: note = Ab1125 CDR L1
RASSSVSSSYLH

SEQ ID NO: 792 - protein, 7 aa, synthetic construct
  REGION 1..7: note = Ab1125 CDR L2
STSSRAT

SEQ ID NO: 793 - protein, 9 aa, synthetic construct
  REGION 1..9: note = Ab1125 CDR L3
QQFSGYQFT

SEQ ID NO: 794 - protein, 471 aa, synthetic construct
  REGION 1..471: note = Ab1126 HC Hole scFv-Fc
QVQLVQSGAEVKKPGASVKVSCKASGYTFTSYWMHWVRQHPGQGLEWMGMIHPNSGGTNYAQKFQGRVTMTRDTSTSTVYMELSSLRSEDTAVYYCAMGDYVSRDYWGQGTLVTVSSGGGGSGGGGSGGGGSEIVLTQSPGTLSLSPGERATLSCRASSSVSSSYLHWYQQKPGQAPRLLIYSTSSRATGIPDRFSGSGSGTDFTLTISRLEPEDFAVYYCQQYSGAQFTFGQGTKLEIKGGGGSDKTHTCPPCPAPEAAGGPSVFLFPPKPKDTLMISRTPEVTCVVVDVSHEDPEVKFNWYVDGVEVHNAKTKPREEQYNSTYRVVSVLTVLHQDWLNGKEYKCKVSNKALPAPIEKTISKAKGQPREPQVYTLPPSRDELTKNQVSLSCAVKGFYPSDIAVEWESNGQPENNYKTTPPVLDSDGSFFLVSKLTVDKSRWQQGNVFSCSVMHEALHNHYTQKSLSLSPG

SEQ ID NO: 795 - protein, 215 aa, synthetic construct; identical to SEQ ID NO: 516
  REGION 1..215: note = Ab1126 LC Knob

SEQ ID NO: 796 - protein, 445 aa, synthetic construct; identical to SEQ ID NO: 517
  REGION 1..445: note = Ab1126 HC Knob

SEQ ID NO: 797 - protein, 5 aa, synthetic construct
  REGION 1..5: note = Ab1126 CDR H1
SYWMH

SEQ ID NO: 798 - protein, 17 aa, synthetic construct
  REGION 1..17: note = Ab1126 CDR H2
MIHPNSGGTNYAQKFQG

SEQ ID NO: 799 - protein, 8 aa, synthetic construct
  REGION 1..8: note = Ab1126 CDR H3
GDYVSRDY

SEQ ID NO: 800 - protein, 12 aa, synthetic construct
  REGION 1..12: note = Ab1126 CDR L1
RASSSVSSSYLH

SEQ ID NO: 801 - protein, 7 aa, synthetic construct
  REGION 1..7: note = Ab1126 CDR L2
STSSRAT

SEQ ID NO: 802 - protein, 9 aa, synthetic construct
  REGION 1..9: note = Ab1126 CDR L3
QQYSGAQFT

SEQ ID NO: 803 - protein, 471 aa, synthetic construct
  REGION 1..471: note = Ab1127 HC Hole scFv-Fc
QVQLVQSGAEVKKPGASVKVSCKASGYTFTSYWMHWVRQHPGQGLEWMGMIHPNSGGTNYAQKFQGRVTMTRDTSTSTVYMELSSLRSEDTAVYYCAMGDYVSRDYWGQGTLVTVSSGGGGSGGGGSGGGGSEIVLTQSPGTLSLSPGERATLSCRASSSVSSSYLHWYQQKPGQAPRLLIYSTSSRATGIPDRFSGSGSGTDFTLTISRLEPEDFAVYYCQQYSGYQLTFGQGTKLEIKGGGGSDKTHTCPPCPAPEAAGGPSVFLFPPKPKDTLMISRTPEVTCVVVDVSHEDPEVKFNWYVDGVEVHNAKTKPREEQYNSTYRVVSVLTVLHQDWLNGKEYKCKVSNKALPAPIEKTISKAKGQPREPQVYTLPPSRDELTKNQVSLSCAVKGFYPSDIAVEWESNGQPENNYKTTPPVLDSDGSFFLVSKLTVDKSRWQQGNVFSCSVMHEALHNHYTQKSLSLSPG

SEQ ID NO: 804 - protein, 215 aa, synthetic construct; identical to SEQ ID NO: 516
  REGION 1..215: note = Ab1127 LC Knob

SEQ ID NO: 805 - protein, 445 aa, synthetic construct; identical to SEQ ID NO: 517
  REGION 1..445: note = Ab1127 HC Knob

SEQ ID NO: 806 - protein, 5 aa, synthetic construct
  REGION 1..5: note = Ab1127 CDR H1
SYWMH

SEQ ID NO: 807 - protein, 17 aa, synthetic construct
  REGION 1..17: note = Ab1127 CDR H2
MIHPNSGGTNYAQKFQG

SEQ ID NO: 808 - protein, 8 aa, synthetic construct
  REGION 1..8: note = Ab1127 CDR H3
GDYVSRDY

SEQ ID NO: 809 - protein, 12 aa, synthetic construct
  REGION 1..12: note = Ab1127 CDR L1
RASSSVSSSYLH

SEQ ID NO: 810 - protein, 7 aa, synthetic construct
  REGION 1..7: note = Ab1127 CDR L2
STSSRAT

SEQ ID NO: 811 - protein, 9 aa, synthetic construct
  REGION 1..9: note = Ab1127 CDR L3
QQYSGYQLT

SEQ ID NO: 812 - protein, 471 aa, synthetic construct
  REGION 1..471: note = Ab1128 HC Hole scFv-Fc
QVQLVQSGAEVKKPGASVKVSCKASGYTFTSYWMHWVRQHPGQGLEWMGMIHPNSGGTNYAQKFQGRVTMTRDTSTSTVYMELSSLRSEDTAVYYCAMGDYVSRDYWGQGTLVTVSSGGGGSGGGGSGGGGSEIVLTQSPGTLSLSPGERATLSCRASSSVSSSYLHWYQQKPGQAPRLLIYSTSSRATGIPDRFSGSGSGTDFTLTISRLEPEDFAVYYCQQYAGYQFTFGQGTKLEIKGGGGSDKTHTCPPCPAPEAAGGPSVFLFPPKPKDTLMISRTPEVTCVVVDVSHEDPEVKFNWYVDGVEVHNAKTKPREEQYNSTYRVVSVLTVLHQDWLNGKEYKCKVSNKALPAPIEKTISKAKGQPREPQVYTLPPSRDELTKNQVSLSCAVKGFYPSDIAVEWESNGQPENNYKTTPPVLDSDGSFFLVSKLTVDKSRWQQGNVFSCSVMHEALHNHYTQKSLSLSPG

SEQ ID NO: 813 - protein, 215 aa, synthetic construct; identical to SEQ ID NO: 516
  REGION 1..215: note = Ab1128 LC Knob

SEQ ID NO: 814 - protein, 445 aa, synthetic construct; identical to SEQ ID NO: 517
  REGION 1..445: note = Ab1128 HC Knob

SEQ ID NO: 815 - protein, 5 aa, synthetic construct
  REGION 1..5: note = Ab1128 CDR H1
SYWMH

SEQ ID NO: 816 - protein, 17 aa, synthetic construct
  REGION 1..17: note = Ab1128 CDR H2
MIHPNSGGTNYAQKFQG

SEQ ID NO: 817 - protein, 8 aa, synthetic construct
  REGION 1..8: note = Ab1128 CDR H3
GDYVSRDY

SEQ ID NO: 818 - protein, 12 aa, synthetic construct
  REGION 1..12: note = Ab1128 CDR L1
RASSSVSSSYLH

SEQ ID NO: 819 - protein, 7 aa, synthetic construct
  REGION 1..7: note = Ab1128 CDR L2
STSSRAT

SEQ ID NO: 820 - protein, 9 aa, synthetic construct
  REGION 1..9: note = Ab1128 CDR L3
QQYAGYQFT

SEQ ID NO: 821 - protein, 471 aa, synthetic construct
  REGION 1..471: note = Ab1129 HC Hole scFv-Fc
QVQLVQSGAEVKKPGASVKVSCKASGYTFTSYWMHWVRQHPGQGLEWMGMIHPNSGGTNYAQKFQGRVTMTRDTSTSTVYMELSSLRSEDTAVYYCAMGDYVSRDYWGQGTLVTVSSGGGGSGGGGSGGGGSEIVLTQSPGTLSLSPGERATLSCRASSSVSSSYLHWYQQKPGQAPRLLIYSTSSRATGIPDRFSGSGSGTDFTLTISRLEPEDFAVYYCQQYSAYQFTFGQGTKLEIKGGGGSDKTHTCPPCPAPEAAGGPSVFLFPPKPKDTLMISRTPEVTCVVVDVSHEDPEVKFNWYVDGVEVHNAKTKPREEQYNSTYRVVSVLTVLHQDWLNGKEYKCKVSNKALPAPIEKTISKAKGQPREPQVYTLPPSRDELTKNQVSLSCAVKGFYPSDIAVEWESNGQPENNYKTTPPVLDSDGSFFLVSKLTVDKSRWQQGNVFSCSVMHEALHNHYTQKSLSLSPG

SEQ ID NO: 822 - protein, 215 aa, synthetic construct; identical to SEQ ID NO: 516
  REGION 1..215: note = Ab1129 LC Knob

SEQ ID NO: 823 - protein, 445 aa, synthetic construct; identical to SEQ ID NO: 517
  REGION 1..445: note = Ab1129 HC Knob

SEQ ID NO: 824 - protein, 5 aa, synthetic construct
  REGION 1..5: note = Ab1129 CDR H1
SYWMH

SEQ ID NO: 825 - protein, 17 aa, synthetic construct
  REGION 1..17: note = Ab1129 CDR H2
MIHPNSGGTNYAQKFQG

SEQ ID NO: 826 - protein, 8 aa, synthetic construct
  REGION 1..8: note = Ab1129 CDR H3
GDYVSRDY

SEQ ID NO: 827 - protein, 12 aa, synthetic construct
  REGION 1..12: note = Ab1129 CDR L1
RASSSVSSSYLH

SEQ ID NO: 828 - protein, 7 aa, synthetic construct
  REGION 1..7: note = Ab1129 CDR L2
STSSRAT

SEQ ID NO: 829 - protein, 9 aa, synthetic construct
  REGION 1..9: note = Ab1129 CDR L3
QQYSAYQFT

SEQ ID NO: 830 - protein, 471 aa, synthetic construct
  REGION 1..471: note = Ab1130 HC Hole scFv-Fc
QVQLVQSGAEVKKPGASVKVSCKASGYTFTSYWMHWVRQHPGQGLEWMGMIHPNSGGTNYAQKFQGRVTMTRDTSTSTVYMELSSLRSEDTAVYYCAMGDYVSRDYWGQGTLVTVSSGGGGSGGGGSGGGGSEIVLTQSPGTLSLSPGERATLSCRASSSVSSSYLHWYQQKPGQAPRLLIYSTSSRATGIPDRFSGSGSGTDFTLTISRLEPEDFAVYYCQQYSGYQFAFGQGTKLEIKGGGGSDKTHTCPPCPAPEAAGGPSVFLFPPKPKDTLMISRTPEVTCVVVDVSHEDPEVKFNWYVDGVEVHNAKTKPREEQYNSTYRVVSVLTVLHQDWLNGKEYKCKVSNKALPAPIEKTISKAKGQPREPQVYTLPPSRDELTKNQVSLSCAVKGFYPSDIAVEWESNGQPENNYKTTPPVLDSDGSFFLVSKLTVDKSRWQQGNVFSCSVMHEALHNHYTQKSLSLSPG

SEQ ID NO: 831 - protein, 215 aa, synthetic construct; identical to SEQ ID NO: 516
  REGION 1..215: note = Ab1130 LC Knob

SEQ ID NO: 832 - protein, 445 aa, synthetic construct; identical to SEQ ID NO: 517
  REGION 1..445: note = Ab1130 HC Knob

SEQ ID NO: 833 - protein, 5 aa, synthetic construct
  REGION 1..5: note = Ab1130 CDR H1
SYWMH

SEQ ID NO: 834 - protein, 17 aa, synthetic construct
  REGION 1..17: note = Ab1130 CDR H2
MIHPNSGGTNYAQKFQG

SEQ ID NO: 835 - protein, 8 aa, synthetic construct
  REGION 1..8: note = Ab1130 CDR H3
GDYVSRDY

SEQ ID NO: 836 - protein, 12 aa, synthetic construct
  REGION 1..12: note = Ab1130 CDR L1
RASSSVSSSYLH

SEQ ID NO: 837 - protein, 7 aa, synthetic construct
  REGION 1..7: note = Ab1130 CDR L2
STSSRAT

SEQ ID NO: 838 - protein, 9 aa, synthetic construct
  REGION 1..9: note = Ab1130 CDR L3
QQYSGYQFA

SEQ ID NO: 839 - protein, 471 aa, synthetic construct
  REGION 1..471: note = Ab1131 HC Hole scFv-Fc
QVQLVQSGAEVKKPGASVKVSCKASGYTFTSYWMHWVRQHPGQGLEWMGMIHPNSGGTNYAQKFQGRVTMTRDTSTSTVYMELSSLRSEDTAVYYCAMGDYVSRDYWGQGTLVTVSSGGGGSGGGGSGGGGSEIVLTQSPGTLSLSPGERATLSCRASSSVSSSYLAWYQQKPGQAPRLLIYSTSSRATGIPDRFSGSGSGTDFTLTISRLEPEDFAVYYCQQYSGYQFTFGQGTKLEIKGGGGSDKTHTCPPCPAPEAAGGPSVFLFPPKPKDTLMISRTPEVTCVVVDVSHEDPEVKFNWYVDGVEVHNAKTKPREEQYNSTYRVVSVLTVLHQDWLNGKEYKCKVSNKALPAPIEKTISKAKGQPREPQVYTLPPSRDELTKNQVSLSCAVKGFYPSDIAVEWESNGQPENNYKTTPPVLDSDGSFFLVSKLTVDKSRWQQGNVFSCSVMHEALHNHYTQKSLSLSPG

SEQ ID NO: 840 - protein, 215 aa, synthetic construct; identical to SEQ ID NO: 516
  REGION 1..215: note = Ab1131 LC Knob

SEQ ID NO: 841 - protein, 445 aa, synthetic construct; identical to SEQ ID NO: 517
  REGION 1..445: note = Ab1131 HC Knob

SEQ ID NO: 842 - protein, 5 aa, synthetic construct
  REGION 1..5: note = Ab1131 CDR H1
SYWMH

SEQ ID NO: 843 - protein, 17 aa, synthetic construct
  REGION 1..17: note = Ab1131 CDR H2
MIHPNSGGTNYAQKFQG

SEQ ID NO: 844 - protein, 8 aa, synthetic construct
  REGION 1..8: note = Ab1131 CDR H3
GDYVSRDY

SEQ ID NO: 845 - protein, 12 aa, synthetic construct
  REGION 1..12: note = Ab1131 CDR L1
RASSSVSSSYLA

SEQ ID NO: 846 - protein, 7 aa, synthetic construct
  REGION 1..7: note = Ab1131 CDR L2
STSSRAT

SEQ ID NO: 847 - protein, 9 aa, synthetic construct
  REGION 1..9: note = Ab1131 CDR L3
QQYSGYQFT

SEQ ID NO: 848 - protein, 471 aa, synthetic construct
  REGION 1..471: note = Ab1132 HC Hole scFv-Fc
QVQLVQSGAEVKKPGASVKVSCKASGYTFTSYWMHWVRQHPGQGLEWMGMIHPNSGGTNYAQKFQGRVTMTRDTSTSTVYMELSSLRSEDTAVYYCAMGDYVSRDYWGQGTLVTVSSGGGGSGGGGSGGGGSEIVLTQSPGTLSLSPGERATLSCRASSSVSSSALHWYQQKPGQAPRLLIYSTSSRATGIPDRFSGSGSGTDFTLTISRLEPEDFAVYYCQQYSGYQFTFGQGTKLEIKGGGGSDKTHTCPPCPAPEAAGGPSVFLFPPKPKDTLMISRTPEVTCVVVDVSHEDPEVKFNWYVDGVEVHNAKTKPREEQYNSTYRVVSVLTVLHQDWLNGKEYKCKVSNKALPAPIEKTISKAKGQPREPQVYTLPPSRDELTKNQVSLSCAVKGFYPSDIAVEWESNGQPENNYKTTPPVLDSDGSFFLVSKLTVDKSRWQQGNVFSCSVMHEALHNHYTQKSLSLSPG

SEQ ID NO: 849 - protein, 215 aa, synthetic construct; identical to SEQ ID NO: 516
  REGION 1..215: note = Ab1132 LC Knob

SEQ ID NO: 850 - protein, 445 aa, synthetic construct; identical to SEQ ID NO: 517
  REGION 1..445: note = Ab1132 HC Knob

SEQ ID NO: 851 - protein, 5 aa, synthetic construct
  REGION 1..5: note = Ab1132 CDR H1
SYWMH

SEQ ID NO: 852 - protein, 17 aa, synthetic construct
  REGION 1..17: note = Ab1132 CDR H2
MIHPNSGGTNYAQKFQG

SEQ ID NO: 853 - protein, 8 aa, synthetic construct
  REGION 1..8: note = Ab1132 CDR H3
GDYVSRDY

SEQ ID NO: 854 - protein, 12 aa, synthetic construct
  REGION 1..12: note = Ab1132 CDR L1
RASSSVSSSALH

SEQ ID NO: 855 - protein, 7 aa, synthetic construct
  REGION 1..7: note = Ab1132 CDR L2
STSSRAT

SEQ ID NO: 856 - protein, 9 aa, synthetic construct
  REGION 1..9: note = Ab1132 CDR L3
QQYSGYQFT

SEQ ID NO: 857 - protein, 214 aa, synthetic construct
  REGION 1..214: note = Ab0670 LC
DIQMTQSPSSLSASVGDRVTITCRASQSVSSAVAWYQQKPGKAPKLLIYSASSLYSGVPSRFSGSRSGTDFTLTISSLQPEDFATYYCQQGGYSLITFGQGTKVEIKRTVAAPSVFIFPPSDSQLKSGTASVVCLLNNFYPREAKVQWKVDNALQSGNSQESVTEQDSKDSTYSLSSTLTLSKADYEKHKVYACEVTHQGLSSPVTKSFNRGEC

SEQ ID NO: 858 - protein, 262 aa, synthetic construct
  REGION 1..262: note = Ab0670 HC
EVQLVESGGGLVQPGGSLRLSCAASGFDVSSYSIHWVRQAPGKGLEWVASISPYYGSTYYADSVKGRFTISADTSKNTAYLQMNSLRAEDTAVYYCARYYEWYKYSLYMGSMGFDYWGQGTLVTVSSASTKGPSVFPLAPSSKSTSGGTAALGCLVKDYFPEPVTVSWNSGALTSGVHTFPAVLQSSGLYSLSSVVTVPSSSLGTQTYICNVNHKPSNTKVDKKVEPKSCGGGGSHHHHHHGGGGSGLNDIFEAQKIEWHEG

SEQ ID NO: 859 - protein, 214 aa, synthetic construct; identical to SEQ ID NO: 857
  REGION 1..214: note = Ab1071 LC

SEQ ID NO: 860 - protein, 241 aa, synthetic construct
  REGION 1..241: note = Ab1071 HC
EVQLVESGGGLVQPGGSLRLSCAASGFDFSSYSIHWVRQAPGKGLEWVASISPYYGSTYYADSVKGRFTISADTSKNTAYLQMNSLRAEDTAVYYCARYYEWYKYDLYAGSLGFDYWGQGTLVTVSSASTKGPSVFPLAPSSKSTSGGTAALGCLVKDYFPEPVTVSWNSGALTSGVHTFPAVLQSSGLYSLSSVVTVPSSSLGTQTYICNVNHKPSNTKVDKKVEPKSCGGGGSHHHHHH

SEQ ID NO: 861 - protein, 214 aa, synthetic construct; identical to SEQ ID NO: 857
  REGION 1..214: note = Ab1072 LC

SEQ ID NO: 862 - protein, 241 aa, synthetic construct
  REGION 1..241: note = Ab1072 HC
EVQLVESGGGLVQPGGSLRLSCAASGFDFSSYSIHWVRQAPGKGLEWVAAISPYYGSTYYADSVKGRFTISADTSKNTAYLQMNSLRAEDTAVYYCARYYEWYKYDLYAGSLGFDYWGQGTLVTVSSASTKGPSVFPLAPSSKSTSGGTAALGCLVKDYFPEPVTVSWNSGALTSGVHTFPAVLQSSGLYSLSSVVTVPSSSLGTQTYICNVNHKPSNTKVDKKVEPKSCGGGGSHHHHHH

SEQ ID NO: 863 - protein, 214 aa, synthetic construct; identical to SEQ ID NO: 857
  REGION 1..214: note = Ab1073 LC

SEQ ID NO: 864 - protein, 241 aa, synthetic construct
  REGION 1..241: note = Ab1073 HC
EVQLVESGGGLVQPGGSLRLSCAASGFDFSSYSIHWVRQAPGKGLEWVAAISPYYGSTYYADSVKGRFTISADTSKNTAYLQMNSLRAEDTAVYYCARYYEYYKYDLYAGSLGFDYWGQGTLVTVSSASTKGPSVFPLAPSSKSTSGGTAALGCLVKDYFPEPVTVSWNSGALTSGVHTFPAVLQSSGLYSLSSVVTVPSSSLGTQTYICNVNHKPSNTKVDKKVEPKSCGGGGSHHHHHH

SEQ ID NO: 865 - protein, 457 aa, synthetic construct
  REGION 1..457: note = Ab0272 HC Hole Fab-Fc
EVQLVESGGGLVQPGGSLRLSCAASGFNVSSYSIHWVRQAPGKGLEWVASISPYYGSTYYADSVKGRFTISADTSKNTAYLQMNSLRAEDTAVYYCARYYEWYKYYLYMGYMGFDYWGQGTLVTVSSASTKGPSVFPLAPSSKSTSGGTAALGCLVKDYFPEPVTVSWNSGALTSGVHTFPAVLQSSGLYSLSSVVTVPSSSLGTQTYICNVNHKPSNTKVDKKVEPKSCDKTHTCPPCPAPEAAGGPSVFLFPPKPKDTLMISRTPEVTCVVVDVSHEDPEVKFNWYVDGVEVHNAKTKPREEQYNSTYRVVSVLTVLHQDWLNGKEYKCKVSNKALGAPIEKTISKAKGQPREPQVYTLPPIRELMTSNQVSLSCAVKGFYPSDIAVEWESNGQPENNYKTTPPVLDSDGSFFLVSKLTVDKSRWQQGNVFSCSVMHEALHNHYTQKSLSLSPGK

SEQ ID NO: 866 - protein, 5 aa, synthetic construct
  REGION 1..5: note = Ab0272 CDR H1
SYSIH

SEQ ID NO: 867 - protein, 17 aa, synthetic construct
  REGION 1..17: note = Ab0272 CDR H2
SISPYYGSTYYADSVKG

SEQ ID NO: 868 - protein, 18 aa, synthetic construct
  REGION 1..18: note = Ab0272 CDR H3
YYEWYKYYLYMGYMGFDY

SEQ ID NO: 869 - protein, 457 aa, synthetic construct
  REGION 1..457: note = Ab0388 HC Hole Fab-Fc
EVQLVESGGGLVQPGGSLRLSCAASGFNVSSYSIHWVRQAPGKGLEWVASISPSYGSTYYADSVKGRFTISADTSKNTAYLQMNSLRAEDTAVYYCARYYEWYKYYLYMGYMGFDYWGQGTLVTVSSASTKGPSVFPLAPSSKSTSGGTAALGCLVKDYFPEPVTVSWNSGALTSGVHTFPAVLQSSGLYSLSSVVTVPSSSLGTQTYICNVNHKPSNTKVDKKVEPKSCDKTHTCPPCPAPEAAGGPSVFLFPPKPKDTLMISRTPEVTCVVVDVSHEDPEVKFNWYVDGVEVHNAKTKPREEQYNSTYRVVSVLTVLHQDWLNGKEYKCKVSNKALGAPIEKTISKAKGQPREPQVYTLPPIRELMTSNQVSLSCAVKGFYPSDIAVEWESNGQPENNYKTTPPVLDSDGSFFLVSKLTVDKSRWQQGNVFSCSVMHEALHNHYTQKSLSLSPGK

SEQ ID NO: 870 - protein, 5 aa, synthetic construct
  REGION 1..5: note = Ab0388 CDR H1
SYSIH

SEQ ID NO: 871 - protein, 17 aa, synthetic construct
  REGION 1..17: note = Ab0388 CDR H2
SISPSYGSTYYADSVKG

SEQ ID NO: 872 - protein, 18 aa, synthetic construct
  REGION 1..18: note = Ab0388 CDR H3
YYEWYKYYLYMGYMGFDY

SEQ ID NO: 873 - protein, 457 aa, synthetic construct
  REGION 1..457: note = Ab0389 HC Hole Fab-Fc
EVQLVESGGGLVQPGGSLRLSCAASGFNVSSYSIHWVRQAPGKGLEWVASISPAYGSTYYADSVKGRFTISADTSKNTAYLQMNSLRAEDTAVYYCARYYEWYKYYLYMGYMGFDYWGQGTLVTVSSASTKGPSVFPLAPSSKSTSGGTAALGCLVKDYFPEPVTVSWNSGALTSGVHTFPAVLQSSGLYSLSSVVTVPSSSLGTQTYICNVNHKPSNTKVDKKVEPKSCDKTHTCPPCPAPEAAGGPSVFLFPPKPKDTLMISRTPEVTCVVVDVSHEDPEVKFNWYVDGVEVHNAKTKPREEQYNSTYRVVSVLTVLHQDWLNGKEYKCKVSNKALGAPIEKTISKAKGQPREPQVYTLPPIRELMTSNQVSLSCAVKGFYPSDIAVEWESNGQPENNYKTTPPVLDSDGSFFLVSKLTVDKSRWQQGNVFSCSVMHEALHNHYTQKSLSLSPGK

SEQ ID NO: 874 - protein, 5 aa, synthetic construct
  REGION 1..5: note = Ab0389 CDR H1
SYSIH

SEQ ID NO: 875 - protein, 17 aa, synthetic construct
  REGION 1..17: note = Ab0389 CDR H2
SISPAYGSTYYADSVKG

SEQ ID NO: 876 - protein, 18 aa, synthetic construct
  REGION 1..18: note = Ab0389 CDR H3
YYEWYKYYLYMGYMGFDY

SEQ ID NO: 877 - protein, 457 aa, synthetic construct
  REGION 1..457: note = Ab0390 HC Hole Fab-Fc
EVQLVESGGGLVQPGGSLRLSCAASGFNVSSYSIHWVRQAPGKGLEWVASISPYSGSTYYADSVKGRFTISADTSKNTAYLQMNSLRAEDTAVYYCARYYEWYKYYLYMGYMGFDYWGQGTLVTVSSASTKGPSVFPLAPSSKSTSGGTAALGCLVKDYFPEPVTVSWNSGALTSGVHTFPAVLQSSGLYSLSSVVTVPSSSLGTQTYICNVNHKPSNTKVDKKVEPKSCDKTHTCPPCPAPEAAGGPSVFLFPPKPKDTLMISRTPEVTCVVVDVSHEDPEVKFNWYVDGVEVHNAKTKPREEQYNSTYRVVSVLTVLHQDWLNGKEYKCKVSNKALGAPIEKTISKAKGQPREPQVYTLPPIRELMTSNQVSLSCAVKGFYPSDIAVEWESNGQPENNYKTTPPVLDSDGSFFLVSKLTVDKSRWQQGNVFSCSVMHEALHNHYTQKSLSLSPGK

SEQ ID NO: 878 - protein, 5 aa, synthetic construct
  REGION 1..5: note = Ab0389 CDR H1
SYSIH

SEQ ID NO: 879 - protein, 17 aa, synthetic construct
  REGION 1..17: note = Ab0390 CDR H2
SISPYSGSTYYADSVKG

SEQ ID NO: 880 - protein, 18 aa, synthetic construct
  REGION 1..18: note = Ab0390 CDR H3
YYEWYKYYLYMGYMGFDY

SEQ ID NO: 881 - protein, 457 aa, synthetic construct
  REGION 1..457: note = Ab0391 HC Hole Fab-Fc
EVQLVESGGGLVQPGGSLRLSCAASGFNVSSYSIHWVRQAPGKGLEWVASISPYAGSTYYADSVKGRFTISADTSKNTAYLQMNSLRAEDTAVYYCARYYEWYKYYLYMGYMGFDYWGQGTLVTVSSASTKGPSVFPLAPSSKSTSGGTAALGCLVKDYFPEPVTVSWNSGALTSGVHTFPAVLQSSGLYSLSSVVTVPSSSLGTQTYICNVNHKPSNTKVDKKVEPKSCDKTHTCPPCPAPEAAGGPSVFLFPPKPKDTLMISRTPEVTCVVVDVSHEDPEVKFNWYVDGVEVHNAKTKPREEQYNSTYRVVSVLTVLHQDWLNGKEYKCKVSNKALGAPIEKTISKAKGQPREPQVYTLPPIRELMTSNQVSLSCAVKGFYPSDIAVEWESNGQPENNYKTTPPVLDSDGSFFLVSKLTVDKSRWQQGNVFSCSVMHEALHNHYTQKSLSLSPGK

SEQ ID NO: 882 - protein, 5 aa, synthetic construct
  REGION 1..5: note = Ab0391 CDR H1
SYSIH

SEQ ID NO: 883 - protein, 17 aa, synthetic construct
  REGION 1..17: note = Ab0391 CDR H2
SISPYAGSTYYADSVKG

SEQ ID NO: 884 - protein, 18 aa, synthetic construct
  REGION 1..18: note = Ab0391 CDR H3
YYEWYKYYLYMGYMGFDY

SEQ ID NO: 885 - protein, 457 aa, synthetic construct
  REGION 1..457: note = Ab0392 HC Hole Fab-Fc
EVQLVESGGGLVQPGGSLRLSCAASGFNVSSYSIHWVRQAPGKGLEWVASISPYYGSTSYADSVKGRFTISADTSKNTAYLQMNSLRAEDTAVYYCARYYEWYKYYLYMGYMGFDYWGQGTLVTVSSASTKGPSVFPLAPSSKSTSGGTAALGCLVKDYFPEPVTVSWNSGALTSGVHTFPAVLQSSGLYSLSSVVTVPSSSLGTQTYICNVNHKPSNTKVDKKVEPKSCDKTHTCPPCPAPEAAGGPSVFLFPPKPKDTLMISRTPEVTCVVVDVSHEDPEVKFNWYVDGVEVHNAKTKPREEQYNSTYRVVSVLTVLHQDWLNGKEYKCKVSNKALGAPIEKTISKAKGQPREPQVYTLPPIRELMTSNQVSLSCAVKGFYPSDIAVEWESNGQPENNYKTTPPVLDSDGSFFLVSKLTVDKSRWQQGNVFSCSVMHEALHNHYTQKSLSLSPGK

SEQ ID NO: 886 - protein, 5 aa, synthetic construct
  REGION 1..5: note = Ab0392 CDR H1
SYSIH

SEQ ID NO: 887 - protein, 17 aa, synthetic construct
  REGION 1..17: note = Ab0392 CDR H2
SISPYYGSTSYADSVKG

SEQ ID NO: 888 - protein, 18 aa, synthetic construct
  REGION 1..18: note = Ab0392 CDR H3
YYEWYKYYLYMGYMGFDY

SEQ ID NO: 889 - protein, 457 aa, synthetic construct
  REGION 1..457: note = Ab0393 HC Hole Fab-Fc
EVQLVESGGGLVQPGGSLRLSCAASGFNVSSYSIHWVRQAPGKGLEWVASISPYYGSTAYADSVKGRFTISADTSKNTAYLQMNSLRAEDTAVYYCARYYEWYKYYLYMGYMGFDYWGQGTLVTVSSASTKGPSVFPLAPSSKSTSGGTAALGCLVKDYFPEPVTVSWNSGALTSGVHTFPAVLQSSGLYSLSSVVTVPSSSLGTQTYICNVNHKPSNTKVDKKVEPKSCDKTHTCPPCPAPEAAGGPSVFLFPPKPKDTLMISRTPEVTCVVVDVSHEDPEVKFNWYVDGVEVHNAKTKPREEQYNSTYRVVSVLTVLHQDWLNGKEYKCKVSNKALGAPIEKTISKAKGQPREPQVYTLPPIRELMTSNQVSLSCAVKGFYPSDIAVEWESNGQPENNYKTTPPVLDSDGSFFLVSKLTVDKSRWQQGNVFSCSVMHEALHNHYTQKSLSLSPGK

SEQ ID NO: 890 - protein, 5 aa, synthetic construct
  REGION 1..5: note = Ab0393 CDR H1
SYSIH

SEQ ID NO: 891 - protein, 17 aa, synthetic construct
  REGION 1..17: note = Ab0393 CDR H2
SISPYYGSTAYADSVKG

SEQ ID NO: 892 - protein, 18 aa, synthetic construct
  REGION 1..18: note = Ab0393 CDR H3
YYEWYKYYLYMGYMGFDY

SEQ ID NO: 893 - protein, 457 aa, synthetic construct
  REGION 1..457: note = Ab0394 HC Hole Fab-Fc
EVQLVESGGGLVQPGGSLRLSCAASGFNVSSYSIHWVRQAPGKGLEWVASISPYYGSTYYADSVKGRFTISADTSKNTAYLQMNSLRAEDTAVYYCARSYEWYKYYLYMGYMGFDYWGQGTLVTVSSASTKGPSVFPLAPSSKSTSGGTAALGCLVKDYFPEPVTVSWNSGALTSGVHTFPAVLQSSGLYSLSSVVTVPSSSLGTQTYICNVNHKPSNTKVDKKVEPKSCDKTHTCPPCPAPEAAGGPSVFLFPPKPKDTLMISRTPEVTCVVVDVSHEDPEVKFNWYVDGVEVHNAKTKPREEQYNSTYRVVSVLTVLHQDWLNGKEYKCKVSNKALGAPIEKTISKAKGQPREPQVYTLPPIRELMTSNQVSLSCAVKGFYPSDIAVEWESNGQPENNYKTTPPVLDSDGSFFLVSKLTVDKSRWQQGNVFSCSVMHEALHNHYTQKSLSLSPGK

SEQ ID NO: 894 - protein, 5 aa, synthetic construct
  REGION 1..5: note = Ab0394 CDR H1
SYSIH

SEQ ID NO: 895 - protein, 17 aa, synthetic construct
  REGION 1..17: note = Ab0394 CDR H2
SISPYYGSTYYADSVKG

SEQ ID NO: 896 - protein, 18 aa, synthetic construct
  REGION 1..18: note = Ab0394 CDR H3
SYEWYKYYLYMGYMGFDY

SEQ ID NO: 897 - protein, 457 aa, synthetic construct
  REGION 1..457: note = Ab0395 HC Hole Fab-Fc
EVQLVESGGGLVQPGGSLRLSCAASGFNVSSYSIHWVRQAPGKGLEWVASISPYYGSTYYADSVKGRFTISADTSKNTAYLQMNSLRAEDTAVYYCARAYEWYKYYLYMGYMGFDYWGQGTLVTVSSASTKGPSVFPLAPSSKSTSGGTAALGCLVKDYFPEPVTVSWNSGALTSGVHTFPAVLQSSGLYSLSSVVTVPSSSLGTQTYICNVNHKPSNTKVDKKVEPKSCDKTHTCPPCPAPEAAGGPSVFLFPPKPKDTLMISRTPEVTCVVVDVSHEDPEVKFNWYVDGVEVHNAKTKPREEQYNSTYRVVSVLTVLHQDWLNGKEYKCKVSNKALGAPIEKTISKAKGQPREPQVYTLPPIRELMTSNQVSLSCAVKGFYPSDIAVEWESNGQPENNYKTTPPVLDSDGSFFLVSKLTVDKSRWQQGNVFSCSVMHEALHNHYTQKSLSLSPGK

SEQ ID NO: 898 - protein, 5 aa, synthetic construct
  REGION 1..5: note = Ab0395 CDR H1
SYSIH

SEQ ID NO: 899 - protein, 17 aa, synthetic construct
  REGION 1..17: note = Ab0395 CDR H2
SISPYYGSTYYADSVKG

SEQ ID NO: 900 - protein, 18 aa, synthetic construct
  REGION 1..18: note = Ab0395 CDR H3
AYEWYKYYLYMGYMGFDY

SEQ ID NO: 901 - protein, 457 aa, synthetic construct
  REGION 1..457: note = Ab0396 HC Hole Fab-Fc
EVQLVESGGGLVQPGGSLRLSCAASGFNVSSYSIHWVRQAPGKGLEWVASISPYYGSTYYADSVKGRFTISADTSKNTAYLQMNSLRAEDTAVYYCARYSEWYKYYLYMGYMGFDYWGQGTLVTVSSASTKGPSVFPLAPSSKSTSGGTAALGCLVKDYFPEPVTVSWNSGALTSGVHTFPAVLQSSGLYSLSSVVTVPSSSLGTQTYICNVNHKPSNTKVDKKVEPKSCDKTHTCPPCPAPEAAGGPSVFLFPPKPKDTLMISRTPEVTCVVVDVSHEDPEVKFNWYVDGVEVHNAKTKPREEQYNSTYRVVSVLTVLHQDWLNGKEYKCKVSNKALGAPIEKTISKAKGQPREPQVYTLPPIRELMTSNQVSLSCAVKGFYPSDIAVEWESNGQPENNYKTTPPVLDSDGSFFLVSKLTVDKSRWQQGNVFSCSVMHEALHNHYTQKSLSLSPGK

SEQ ID NO: 902 - protein, 5 aa, synthetic construct
  REGION 1..5: note = Ab0396 CDR H1
SYSIH

SEQ ID NO: 903 - protein, 17 aa, synthetic construct
  REGION 1..17: note = Ab0396 CDR H2
SISPYYGSTYYADSVKG

SEQ ID NO: 904 - protein, 18 aa, synthetic construct
  REGION 1..18: note = Ab0396 CDR H3
YSEWYKYYLYMGYMGFDY

SEQ ID NO: 905 - protein, 457 aa, synthetic construct
  REGION 1..457: note = Ab0397 HC Hole Fab-Fc
EVQLVESGGGLVQPGGSLRLSCAASGFNVSSYSIHWVRQAPGKGLEWVASISPYYGSTYYADSVKGRFTISADTSKNTAYLQMNSLRAEDTAVYYCARYAEWYKYYLYMGYMGFDYWGQGTLVTVSSASTKGPSVFPLAPSSKSTSGGTAALGCLVKDYFPEPVTVSWNSGALTSGVHTFPAVLQSSGLYSLSSVVTVPSSSLGTQTYICNVNHKPSNTKVDKKVEPKSCDKTHTCPPCPAPEAAGGPSVFLFPPKPKDTLMISRTPEVTCVVVDVSHEDPEVKFNWYVDGVEVHNAKTKPREEQYNSTYRVVSVLTVLHQDWLNGKEYKCKVSNKALGAPIEKTISKAKGQPREPQVYTLPPIRELMTSNQVSLSCAVKGFYPSDIAVEWESNGQPENNYKTTPPVLDSDGSFFLVSKLTVDKSRWQQGNVFSCSVMHEALHNHYTQKSLSLSPGK

SEQ ID NO: 906 - protein, 5 aa, synthetic construct
  REGION 1..5: note = Ab0397 CDR H1
SYSIH

SEQ ID NO: 907 - protein, 17 aa, synthetic construct
  REGION 1..17: note = Ab0397 CDR H2
SISPYYGSTYYADSVKG

SEQ ID NO: 908 - protein, 18 aa, synthetic construct
  REGION 1..18: note = Ab0397 CDR H3
YAEWYKYYLYMGYMGFDY

SEQ ID NO: 909 - protein, 457 aa, synthetic construct
  REGION 1..457: note = Ab0398 HC Hole Fab-Fc
EVQLVESGGGLVQPGGSLRLSCAASGFNVSSYSIHWVRQAPGKGLEWVASISPYYGSTYYADSVKGRFTISADTSKNTAYLQMNSLRAEDTAVYYCARYYESYKYYLYMGYMGFDYWGQGTLVTVSSASTKGPSVFPLAPSSKSTSGGTAALGCLVKDYFPEPVTVSWNSGALTSGVHTFPAVLQSSGLYSLSSVVTVPSSSLGTQTYICNVNHKPSNTKVDKKVEPKSCDKTHTCPPCPAPEAAGGPSVFLFPPKPKDTLMISRTPEVTCVVVDVSHEDPEVKFNWYVDGVEVHNAKTKPREEQYNSTYRVVSVLTVLHQDWLNGKEYKCKVSNKALGAPIEKTISKAKGQPREPQVYTLPPIRELMTSNQVSLSCAVKGFYPSDIAVEWESNGQPENNYKTTPPVLDSDGSFFLVSKLTVDKSRWQQGNVFSCSVMHEALHNHYTQKSLSLSPGK

SEQ ID NO: 910 - protein, 5 aa, synthetic construct
  REGION 1..5: note = Ab0398 CDR H1
SYSIH

SEQ ID NO: 911 - protein, 17 aa, synthetic construct
  REGION 1..17: note = Ab0398 CDR H2
SISPYYGSTYYADSVKG

SEQ ID NO: 912 - protein, 18 aa, synthetic construct
  REGION 1..18: note = Ab0398 CDR H3
YYESYKYYLYMGYMGFDY

SEQ ID NO: 913 - protein, 457 aa, synthetic construct
  REGION 1..457: note = Ab0399 HC Hole Fab-Fc
EVQLVESGGGLVQPGGSLRLSCAASGFNVSSYSIHWVRQAPGKGLEWVASISPYYGSTYYADSVKGRFTISADTSKNTAYLQMNSLRAEDTAVYYCARYYEAYKYYLYMGYMGFDYWGQGTLVTVSSASTKGPSVFPLAPSSKSTSGGTAALGCLVKDYFPEPVTVSWNSGALTSGVHTFPAVLQSSGLYSLSSVVTVPSSSLGTQTYICNVNHKPSNTKVDKKVEPKSCDKTHTCPPCPAPEAAGGPSVFLFPPKPKDTLMISRTPEVTCVVVDVSHEDPEVKFNWYVDGVEVHNAKTKPREEQYNSTYRVVSVLTVLHQDWLNGKEYKCKVSNKALGAPIEKTISKAKGQPREPQVYTLPPIRELMTSNQVSLSCAVKGFYPSDIAVEWESNGQPENNYKTTPPVLDSDGSFFLVSKLTVDKSRWQQGNVFSCSVMHEALHNHYTQKSLSLSPGK

SEQ ID NO: 914 - protein, 5 aa, synthetic construct
  REGION 1..5: note = Ab0399 CDR H1
SYSIH

SEQ ID NO: 915 - protein, 17 aa, synthetic construct
  REGION 1..17: note = Ab0399 CDR H2
SISPYYGSTYYADSVKG

SEQ ID NO: 916 - protein, 18 aa, synthetic construct
  REGION 1..18: note = Ab0399 CDR H3
YYEAYKYYLYMGYMGFDY

SEQ ID NO: 917 - protein, 457 aa, synthetic construct
  REGION 1..457: note = Ab0400 HC Hole Fab-Fc
EVQLVESGGGLVQPGGSLRLSCAASGFNVSSYSIHWVRQAPGKGLEWVASISPYYGSTYYADSVKGRFTISADTSKNTAYLQMNSLRAEDTAVYYCARYYEWSKYYLYMGYMGFDYWGQGTLVTVSSASTKGPSVFPLAPSSKSTSGGTAALGCLVKDYFPEPVTVSWNSGALTSGVHTFPAVLQSSGLYSLSSVVTVPSSSLGTQTYICNVNHKPSNTKVDKKVEPKSCDKTHTCPPCPAPEAAGGPSVFLFPPKPKDTLMISRTPEVTCVVVDVSHEDPEVKFNWYVDGVEVHNAKTKPREEQYNSTYRVVSVLTVLHQDWLNGKEYKCKVSNKALGAPIEKTISKAKGQPREPQVYTLPPIRELMTSNQVSLSCAVKGFYPSDIAVEWESNGQPENNYKTTPPVLDSDGSFFLVSKLTVDKSRWQQGNVFSCSVMHEALHNHYTQKSLSLSPGK

SEQ ID NO: 918 - protein, 5 aa, synthetic construct
  REGION 1..5: note = Ab0400 CDR H1
SYSIH

SEQ ID NO: 919 - protein, 17 aa, synthetic construct
  REGION 1..17: note = Ab0400 CDR H2
SISPYYGSTYYADSVKG

SEQ ID NO: 920 - protein, 18 aa, synthetic construct
  REGION 1..18: note = Ab0400 CDR H3
YYEWSKYYLYMGYMGFDY

SEQ ID NO: 921 - protein, 457 aa, synthetic construct
  REGION 1..457: note = Ab0401 HC Hole Fab-Fc
EVQLVESGGGLVQPGGSLRLSCAASGFNVSSYSIHWVRQAPGKGLEWVASISPYYGSTYYADSVKGRFTISADTSKNTAYLQMNSLRAEDTAVYYCARYYEWAKYYLYMGYMGFDYWGQGTLVTVSSASTKGPSVFPLAPSSKSTSGGTAALGCLVKDYFPEPVTVSWNSGALTSGVHTFPAVLQSSGLYSLSSVVTVPSSSLGTQTYICNVNHKPSNTKVDKKVEPKSCDKTHTCPPCPAPEAAGGPSVFLFPPKPKDTLMISRTPEVTCVVVDVSHEDPEVKFNWYVDGVEVHNAKTKPREEQYNSTYRVVSVLTVLHQDWLNGKEYKCKVSNKALGAPIEKTISKAKGQPREPQVYTLPPIRELMTSNQVSLSCAVKGFYPSDIAVEWESNGQPENNYKTTPPVLDSDGSFFLVSKLTVDKSRWQQGNVFSCSVMHEALHNHYTQKSLSLSPGK

SEQ ID NO: 922 - protein, 5 aa, synthetic construct
  REGION 1..5: note = Ab0401 CDR H1
SYSIH

SEQ ID NO: 923 - protein, 17 aa, synthetic construct
  REGION 1..17: note = Ab0401 CDR H2
SISPYYGSTYYADSVKG

SEQ ID NO: 924 - protein, 18 aa, synthetic construct
  REGION 1..18: note = Ab0401 CDR H3
YYEWAKYYLYMGYMGFDY

SEQ ID NO: 925 - protein, 457 aa, synthetic construct
  REGION 1..457: note = Ab0402 HC Hole Fab-Fc
EVQLVESGGGLVQPGGSLRLSCAASGFNVSSYSIHWVRQAPGKGLEWVASISPYYGSTYYADSVKGRFTISADTSKNTAYLQMNSLRAEDTAVYYCARYYEWYKSYLYMGYMGFDYWGQGTLVTVSSASTKGPSVFPLAPSSKSTSGGTAALGCLVKDYFPEPVTVSWNSGALTSGVHTFPAVLQSSGLYSLSSVVTVPSSSLGTQTYICNVNHKPSNTKVDKKVEPKSCDKTHTCPPCPAPEAAGGPSVFLFPPKPKDTLMISRTPEVTCVVVDVSHEDPEVKFNWYVDGVEVHNAKTKPREEQYNSTYRVVSVLTVLHQDWLNGKEYKCKVSNKALGAPIEKTISKAKGQPREPQVYTLPPIRELMTSNQVSLSCAVKGFYPSDIAVEWESNGQPENNYKTTPPVLDSDGSFFLVSKLTVDKSRWQQGNVFSCSVMHEALHNHYTQKSLSLSPGK

SEQ ID NO: 926 - protein, 5 aa, synthetic construct
  REGION 1..5: note = Ab0402 CDR H1
SYSIH

SEQ ID NO: 927 - protein, 17 aa, synthetic construct
  REGION 1..17: note = Ab0402 CDR H2
SISPYYGSTYYADSVKG

SEQ ID NO: 928 - protein, 18 aa, synthetic construct
  REGION 1..18: note = Ab0402 CDR H3
YYEWYKSYLYMGYMGFDY

SEQ ID NO: 929 - protein, 457 aa, synthetic construct
  REGION 1..457: note = Ab0403 HC Hole Fab-Fc
EVQLVESGGGLVQPGGSLRLSCAASGFNVSSYSIHWVRQAPGKGLEWVASISPYYGSTYYADSVKGRFTISADTSKNTAYLQMNSLRAEDTAVYYCARYYEWYKAYLYMGYMGFDYWGQGTLVTVSSASTKGPSVFPLAPSSKSTSGGTAALGCLVKDYFPEPVTVSWNSGALTSGVHTFPAVLQSSGLYSLSSVVTVPSSSLGTQTYICNVNHKPSNTKVDKKVEPKSCDKTHTCPPCPAPEAAGGPSVFLFPPKPKDTLMISRTPEVTCVVVDVSHEDPEVKFNWYVDGVEVHNAKTKPREEQYNSTYRVVSVLTVLHQDWLNGKEYKCKVSNKALGAPIEKTISKAKGQPREPQVYTLPPIRELMTSNQVSLSCAVKGFYPSDIAVEWESNGQPENNYKTTPPVLDSDGSFFLVSKLTVDKSRWQQGNVFSCSVMHEALHNHYTQKSLSLSPGK

SEQ ID NO: 930 - protein, 5 aa, synthetic construct
  REGION 1..5: note = Ab0403 CDR H1
SYSIH

SEQ ID NO: 931 - protein, 17 aa, synthetic construct
  REGION 1..17: note = Ab0403 CDR H2
SISPYYGSTYYADSVKG

SEQ ID NO: 932 - protein, 18 aa, synthetic construct
  REGION 1..18: note = Ab0403 CDR H3
YYEWYKYSLYMGYMGFDY

SEQ ID NO: 933 - protein, 457 aa, synthetic construct
  REGION 1..457: note = Ab0404 HC Hole Fab-Fc
EVQLVESGGGLVQPGGSLRLSCAASGFNVSSYSIHWVRQAPGKGLEWVASISPYYGSTYYADSVKGRFTISADTSKNTAYLQMNSLRAEDTAVYYCARYYEWYKYSLYMGYMGFDYWGQGTLVTVSSASTKGPSVFPLAPSSKSTSGGTAALGCLVKDYFPEPVTVSWNSGALTSGVHTFPAVLQSSGLYSLSSVVTVPSSSLGTQTYICNVNHKPSNTKVDKKVEPKSCDKTHTCPPCPAPEAAGGPSVFLFPPKPKDTLMISRTPEVTCVVVDVSHEDPEVKFNWYVDGVEVHNAKTKPREEQYNSTYRVVSVLTVLHQDWLNGKEYKCKVSNKALGAPIEKTISKAKGQPREPQVYTLPPIRELMTSNQVSLSCAVKGFYPSDIAVEWESNGQPENNYKTTPPVLDSDGSFFLVSKLTVDKSRWQQGNVFSCSVMHEALHNHYTQKSLSLSPGK

SEQ ID NO: 934 - protein, 5 aa, synthetic construct
  REGION 1..5: note = Ab0404 CDR H1
SYSIH

SEQ ID NO: 935 - protein, 17 aa, synthetic construct
  REGION 1..17: note = Ab0404 CDR H2
SISPYYGSTYYADSVKG

SEQ ID NO: 936 - protein, 18 aa, synthetic construct
  REGION 1..18: note = Ab0404 CDR H3
YYEWYKYSLYMGYMGFDY

SEQ ID NO: 937 - protein, 457 aa, synthetic construct
  REGION 1..457: note = Ab0405 HC Hole Fab-Fc
EVQLVESGGGLVQPGGSLRLSCAASGFNVSSYSIHWVRQAPGKGLEWVASISPYYGSTYYADSVKGRFTISADTSKNTAYLQMNSLRAEDTAVYYCARYYEWYKYALYMGYMGFDYWGQGTLVTVSSASTKGPSVFPLAPSSKSTSGGTAALGCLVKDYFPEPVTVSWNSGALTSGVHTFPAVLQSSGLYSLSSVVTVPSSSLGTQTYICNVNHKPSNTKVDKKVEPKSCDKTHTCPPCPAPEAAGGPSVFLFPPKPKDTLMISRTPEVTCVVVDVSHEDPEVKFNWYVDGVEVHNAKTKPREEQYNSTYRVVSVLTVLHQDWLNGKEYKCKVSNKALGAPIEKTISKAKGQPREPQVYTLPPIRELMTSNQVSLSCAVKGFYPSDIAVEWESNGQPENNYKTTPPVLDSDGSFFLVSKLTVDKSRWQQGNVFSCSVMHEALHNHYTQKSLSLSPGK

SEQ ID NO: 938 - protein, 5 aa, synthetic construct
  REGION 1..5: note = Ab0405 CDR H1
SYSIH

SEQ ID NO: 939 - protein, 17 aa, synthetic construct
  REGION 1..17: note = Ab0405 CDR H2
SISPYYGSTYYADSVKG

SEQ ID NO: 940 - protein, 18 aa, synthetic construct
  REGION 1..18: note = Ab0405 CDR H3
YYEWYKYALYMGYMGFDY

SEQ ID NO: 941 - protein, 457 aa, synthetic construct
  REGION 1..457: note = Ab0406 HC Hole Fab-Fc
EVQLVESGGGLVQPGGSLRLSCAASGFNVSSYSIHWVRQAPGKGLEWVASISPYYGSTYYADSVKGRFTISADTSKNTAYLQMNSLRAEDTAVYYCARYYEWYKYYLSMGYMGFDYWGQGTLVTVSSASTKGPSVFPLAPSSKSTSGGTAALGCLVKDYFPEPVTVSWNSGALTSGVHTFPAVLQSSGLYSLSSVVTVPSSSLGTQTYICNVNHKPSNTKVDKKVEPKSCDKTHTCPPCPAPEAAGGPSVFLFPPKPKDTLMISRTPEVTCVVVDVSHEDPEVKFNWYVDGVEVHNAKTKPREEQYNSTYRVVSVLTVLHQDWLNGKEYKCKVSNKALGAPIEKTISKAKGQPREPQVYTLPPIRELMTSNQVSLSCAVKGFYPSDIAVEWESNGQPENNYKTTPPVLDSDGSFFLVSKLTVDKSRWQQGNVFSCSVMHEALHNHYTQKSLSLSPGK

SEQ ID NO: 942 - protein, 5 aa, synthetic construct
  REGION 1..5: note = Ab0406 CDR H1
SYSIH

SEQ ID NO: 943 - protein, 17 aa, synthetic construct
  REGION 1..17: note = Ab0406 CDR H2
SISPYYGSTYYADSVKG

SEQ ID NO: 944 - protein, 18 aa, synthetic construct
  REGION 1..18: note = Ab0406 CDR H3
YYEWYKYYLSMGYMGFDY

SEQ ID NO: 945 - protein, 457 aa, synthetic construct
  REGION 1..457: note = Ab0407 HC Hole Fab-Fc
EVQLVESGGGLVQPGGSLRLSCAASGFNVSSYSIHWVRQAPGKGLEWVASISPYYGSTYYADSVKGRFTISADTSKNTAYLQMNSLRAEDTAVYYCARYYEWYKYYLAMGYMGFDYWGQGTLVTVSSASTKGPSVFPLAPSSKSTSGGTAALGCLVKDYFPEPVTVSWNSGALTSGVHTFPAVLQSSGLYSLSSVVTVPSSSLGTQTYICNVNHKPSNTKVDKKVEPKSCDKTHTCPPCPAPEAAGGPSVFLFPPKPKDTLMISRTPEVTCVVVDVSHEDPEVKFNWYVDGVEVHNAKTKPREEQYNSTYRVVSVLTVLHQDWLNGKEYKCKVSNKALGAPIEKTISKAKGQPREPQVYTLPPIRELMTSNQVSLSCAVKGFYPSDIAVEWESNGQPENNYKTTPPVLDSDGSFFLVSKLTVDKSRWQQGNVFSCSVMHEALHNHYTQKSLSLSPGK

SEQ ID NO: 946 - protein, 5 aa, synthetic construct
  REGION 1..5: note = Ab0407 CDR H1
SYSIH

SEQ ID NO: 947 - protein, 17 aa, synthetic construct
  REGION 1..17: note = Ab0407 CDR H2
SISPYYGSTYYADSVKG

SEQ ID NO: 948 - protein, 18 aa, synthetic construct
  REGION 1..18: note = Ab0407 CDR H3
YYEWYKYYLAMGYMGFDY

SEQ ID NO: 949 - protein, 457 aa, synthetic construct
  REGION 1..457: note = Ab0408 HC Hole Fab-Fc
EVQLVESGGGLVQPGGSLRLSCAASGFNVSSYSIHWVRQAPGKGLEWVASISPYYGSTYYADSVKGRFTISADTSKNTAYLQMNSLRAEDTAVYYCARYYEWYKYYLYAGYMGFDYWGQGTLVTVSSASTKGPSVFPLAPSSKSTSGGTAALGCLVKDYFPEPVTVSWNSGALTSGVHTFPAVLQSSGLYSLSSVVTVPSSSLGTQTYICNVNHKPSNTKVDKKVEPKSCDKTHTCPPCPAPEAAGGPSVFLFPPKPKDTLMISRTPEVTCVVVDVSHEDPEVKFNWYVDGVEVHNAKTKPREEQYNSTYRVVSVLTVLHQDWLNGKEYKCKVSNKALGAPIEKTISKAKGQPREPQVYTLPPIRELMTSNQVSLSCAVKGFYPSDIAVEWESNGQPENNYKTTPPVLDSDGSFFLVSKLTVDKSRWQQGNVFSCSVMHEALHNHYTQKSLSLSPGK

SEQ ID NO: 950 - protein, 5 aa, synthetic construct
  REGION 1..5: note = Ab0408 CDR H1
SYSIH

SEQ ID NO: 951 - protein, 17 aa, synthetic construct
  REGION 1..17: note = Ab0408 CDR H2
SISPYYGSTYYADSVKG

SEQ ID NO: 952 - protein, 18 aa, synthetic construct
  REGION 1..18: note = Ab0408 CDR H3
YYEWYKYYLYAGYMGFDY

SEQ ID NO: 953 - protein, 457 aa, synthetic construct
  REGION 1..457: note = Ab0409 HC Hole Fab-Fc
EVQLVESGGGLVQPGGSLRLSCAASGFNVSSYSIHWVRQAPGKGLEWVASISPYYGSTYYADSVKGRFTISADTSKNTAYLQMNSLRAEDTAVYYCARYYEWYKYYLYLGYMGFDYWGQGTLVTVSSASTKGPSVFPLAPSSKSTSGGTAALGCLVKDYFPEPVTVSWNSGALTSGVHTFPAVLQSSGLYSLSSVVTVPSSSLGTQTYICNVNHKPSNTKVDKKVEPKSCDKTHTCPPCPAPEAAGGPSVFLFPPKPKDTLMISRTPEVTCVVVDVSHEDPEVKFNWYVDGVEVHNAKTKPREEQYNSTYRVVSVLTVLHQDWLNGKEYKCKVSNKALGAPIEKTISKAKGQPREPQVYTLPPIRELMTSNQVSLSCAVKGFYPSDIAVEWESNGQPENNYKTTPPVLDSDGSFFLVSKLTVDKSRWQQGNVFSCSVMHEALHNHYTQKSLSLSPGK

SEQ ID NO: 954 - protein, 5 aa, synthetic construct
  REGION 1..5: note = Ab0409 CDR H1
SYSIH

SEQ ID NO: 955 - protein, 17 aa, synthetic construct
  REGION 1..17: note = Ab0409 CDR H2
SISPYYGSTYYADSVKG

SEQ ID NO: 956 - protein, 18 aa, synthetic construct
  REGION 1..18: note = Ab0409 CDR H3
YYEWYKYYLYLGYMGFDY

SEQ ID NO: 957 - protein, 457 aa, synthetic construct
  REGION 1..457: note = Ab0410 HC Hole Fab-Fc
EVQLVESGGGLVQPGGSLRLSCAASGFNVSSYSIHWVRQAPGKGLEWVASISPYYGSTYYADSVKGRFTISADTSKNTAYLQMNSLRAEDTAVYYCARYYEWYKYYLYMGSMGFDYWGQGTLVTVSSASTKGPSVFPLAPSSKSTSGGTAALGCLVKDYFPEPVTVSWNSGALTSGVHTFPAVLQSSGLYSLSSVVTVPSSSLGTQTYICNVNHKPSNTKVDKKVEPKSCDKTHTCPPCPAPEAAGGPSVFLFPPKPKDTLMISRTPEVTCVVVDVSHEDPEVKFNWYVDGVEVHNAKTKPREEQYNSTYRVVSVLTVLHQDWLNGKEYKCKVSNKALGAPIEKTISKAKGQPREPQVYTLPPIRELMTSNQVSLSCAVKGFYPSDIAVEWESNGQPENNYKTTPPVLDSDGSFFLVSKLTVDKSRWQQGNVFSCSVMHEALHNHYTQKSLSLSPGK

SEQ ID NO: 958 - protein, 5 aa, synthetic construct
  REGION 1..5: note = Ab0410 CDR H1
SYSIH

SEQ ID NO: 959 - protein, 17 aa, synthetic construct
  REGION 1..17: note = Ab0410 CDR H2
SISPYYGSTYYADSVKG

SEQ ID NO: 960 - protein, 18 aa, synthetic construct
  REGION 1..18: note = Ab0410 CDR H3
YYEWYKYYLYMGSMGFDY

SEQ ID NO: 961 - protein, 457 aa, synthetic construct
  REGION 1..457: note = Ab0411 HC Hole Fab-Fc
EVQLVESGGGLVQPGGSLRLSCAASGFNVSSYSIHWVRQAPGKGLEWVASISPYYGSTYYADSVKGRFTISADTSKNTAYLQMNSLRAEDTAVYYCARYYEWYKYYLYMGAMGFDYWGQGTLVTVSSASTKGPSVFPLAPSSKSTSGGTAALGCLVKDYFPEPVTVSWNSGALTSGVHTFPAVLQSSGLYSLSSVVTVPSSSLGTQTYICNVNHKPSNTKVDKKVEPKSCDKTHTCPPCPAPEAAGGPSVFLFPPKPKDTLMISRTPEVTCVVVDVSHEDPEVKFNWYVDGVEVHNAKTKPREEQYNSTYRVVSVLTVLHQDWLNGKEYKCKVSNKALGAPIEKTISKAKGQPREPQVYTLPPIRELMTSNQVSLSCAVKGFYPSDIAVEWESNGQPENNYKTTPPVLDSDGSFFLVSKLTVDKSRWQQGNVFSCSVMHEALHNHYTQKSLSLSPGK

SEQ ID NO: 962 - protein, 5 aa, synthetic construct
  REGION 1..5: note = Ab0411 CDR H1
SYSIH

SEQ ID NO: 963 - protein, 17 aa, synthetic construct
  REGION 1..17: note = Ab0411 CDR H2
SISPYYGSTYYADSVKG

SEQ ID NO: 964 - protein, 18 aa, synthetic construct
  REGION 1..18: note = Ab0411 CDR H3
YYEWYKYYLYMGAMGFDY

SEQ ID NO: 965 - protein, 457 aa, synthetic construct
  REGION 1..457: note = Ab0412 HC Hole Fab-Fc
EVQLVESGGGLVQPGGSLRLSCAASGFNVSSYSIHWVRQAPGKGLEWVASISPYYGSTYYADSVKGRFTISADTSKNTAYLQMNSLRAEDTAVYYCARYYEWYKYYLYMGYAGFDYWGQGTLVTVSSASTKGPSVFPLAPSSKSTSGGTAALGCLVKDYFPEPVTVSWNSGALTSGVHTFPAVLQSSGLYSLSSVVTVPSSSLGTQTYICNVNHKPSNTKVDKKVEPKSCDKTHTCPPCPAPEAAGGPSVFLFPPKPKDTLMISRTPEVTCVVVDVSHEDPEVKFNWYVDGVEVHNAKTKPREEQYNSTYRVVSVLTVLHQDWLNGKEYKCKVSNKALGAPIEKTISKAKGQPREPQVYTLPPIRELMTSNQVSLSCAVKGFYPSDIAVEWESNGQPENNYKTTPPVLDSDGSFFLVSKLTVDKSRWQQGNVFSCSVMHEALHNHYTQKSLSLSPGK

SEQ ID NO: 966 - protein, 5 aa, synthetic construct
  REGION 1..5: note = Ab0412 CDR H1
SYSIH

SEQ ID NO: 967 - protein, 17 aa, synthetic construct
  REGION 1..17: note = Ab0412 CDR H2
SISPYYGSTYYADSVKG

SEQ ID NO: 968 - protein, 18 aa, synthetic construct
  REGION 1..18: note = Ab0412 CDR H3
YYEWYKYYLYMGYAGFDY

SEQ ID NO: 969 - protein, 457 aa, synthetic construct
  REGION 1..457: note = Ab0413 HC Hole Fab-Fc
EVQLVESGGGLVQPGGSLRLSCAASGFNVSSYSIHWVRQAPGKGLEWVASISPYYGSTYYADSVKGRFTISADTSKNTAYLQMNSLRAEDTAVYYCARYYEWYKYYLYMGYLGFDYWGQGTLVTVSSASTKGPSVFPLAPSSKSTSGGTAALGCLVKDYFPEPVTVSWNSGALTSGVHTFPAVLQSSGLYSLSSVVTVPSSSLGTQTYICNVNHKPSNTKVDKKVEPKSCDKTHTCPPCPAPEAAGGPSVFLFPPKPKDTLMISRTPEVTCVVVDVSHEDPEVKFNWYVDGVEVHNAKTKPREEQYNSTYRVVSVLTVLHQDWLNGKEYKCKVSNKALGAPIEKTISKAKGQPREPQVYTLPPIRELMTSNQVSLSCAVKGFYPSDIAVEWESNGQPENNYKTTPPVLDSDGSFFLVSKLTVDKSRWQQGNVFSCSVMHEALHNHYTQKSLSLSPGK

SEQ ID NO: 970 - protein, 5 aa, synthetic construct
  REGION 1..5: note = Ab0413 CDR H1
SYSIH

SEQ ID NO: 971 - protein, 17 aa, synthetic construct
  REGION 1..17: note = Ab0413 CDR H2
SISPYYGSTYYADSVKG

SEQ ID NO: 972 - protein, 18 aa, synthetic construct
  REGION 1..18: note = Ab0413 CDR H3
YYEWYKYYLYMGYLGFDY

SEQ ID NO: 973 - protein, 457 aa, synthetic construct
  REGION 1..457: note = Ab0414 HC Hole Fab-Fc
EVQLVESGGGLVQPGGSLRLSCAASGFNVSSYSIHWVRQAPGKGLEWVASISPYYGSTYYADSVKGRFTISADTSKNTAYLQMNSLRAEDTAVYYCARYYEWYKYYLYMGYMGADYWGQGTLVTVSSASTKGPSVFPLAPSSKSTSGGTAALGCLVKDYFPEPVTVSWNSGALTSGVHTFPAVLQSSGLYSLSSVVTVPSSSLGTQTYICNVNHKPSNTKVDKKVEPKSCDKTHTCPPCPAPEAAGGPSVFLFPPKPKDTLMISRTPEVTCVVVDVSHEDPEVKFNWYVDGVEVHNAKTKPREEQYNSTYRVVSVLTVLHQDWLNGKEYKCKVSNKALGAPIEKTISKAKGQPREPQVYTLPPIRELMTSNQVSLSCAVKGFYPSDIAVEWESNGQPENNYKTTPPVLDSDGSFFLVSKLTVDKSRWQQGNVFSCSVMHEALHNHYTQKSLSLSPGK

SEQ ID NO: 974 - protein, 5 aa, synthetic construct
  REGION 1..5: note = Ab0414 CDR H1
SYSIH

SEQ ID NO: 975 - protein, 17 aa, synthetic construct
  REGION 1..17: note = Ab0414 CDR H2
SISPYYGSTYYADSVKG

SEQ ID NO: 976 - protein, 18 aa, synthetic construct
  REGION 1..18: note = Ab0414 CDR H3
YYEWYKYYLYMGYMGADY

SEQ ID NO: 977 - protein, 214 aa, synthetic construct; identical to SEQ ID NO: 857
  REGION 1..214: note = LC sequence

SEQ ID NO: 978 - protein, 11 aa, synthetic construct
  REGION 1..11: note = CDR L1
RASQSVSSAVA

SEQ ID NO: 979 - protein, 7 aa, synthetic construct
  REGION 1..7: note = CDR L2
SASSLYS

SEQ ID NO: 980 - protein, 9 aa, synthetic construct
  REGION 1..9: note = CDR L3
QQGGYSLIT

SEQ ID NO: 981 - protein, 238 aa, synthetic construct; identical to SEQ ID NO: 52
  REGION 1..238: note = Knob Fc-6xHis

SEQ ID NO: 982 - protein, 457 aa, synthetic construct
  REGION 1..457: note = Ab0441 HC Hole Fab-Fc
EVQLVESGGGLVQPGGSLRLSCAASGFNVSSYSIHWVRQAPGKGLEWVASISPYYGSTYYADSVKGRFTISADTSKNTAYLQMNSLRAEDTAVYYCARYAEWYKYSLYMGYMGFDYWGQGTLVTVSSASTKGPSVFPLAPSSKSTSGGTAALGCLVKDYFPEPVTVSWNSGALTSGVHTFPAVLQSSGLYSLSSVVTVPSSSLGTQTYICNVNHKPSNTKVDKKVEPKSCDKTHTCPPCPAPEAAGGPSVFLFPPKPKDTLMISRTPEVTCVVVDVSHEDPEVKFNWYVDGVEVHNAKTKPREEQYNSTYRVVSVLTVLHQDWLNGKEYKCKVSNKALGAPIEKTISKAKGQPREPQVYTLPPIRELMTSNQVSLSCAVKGFYPSDIAVEWESNGQPENNYKTTPPVLDSDGSFFLVSKLTVDKSRWQQGNVFSCSVMHEALHNHYTQKSLSLSPGK

SEQ ID NO: 983 - protein, 5 aa, synthetic construct
  REGION 1..5: note = Ab0441 CDR H1
SYSIH

SEQ ID NO: 984 - protein, 17 aa, synthetic construct
  REGION 1..17: note = Ab0441 CDR H2
SISPYYGSTYYADSVKG

SEQ ID NO: 985 - protein, 18 aa, synthetic construct
  REGION 1..18: note = Ab0441 CDR H3
YAEWYKYSLYMGYMGFDY

SEQ ID NO: 986 - protein, 457 aa, synthetic construct
  REGION 1..457: note = Ab0442 HC Hole Fab-Fc
EVQLVESGGGLVQPGGSLRLSCAASGFNVSSYSIHWVRQAPGKGLEWVASISPYYGSTYYADSVKGRFTISADTSKNTAYLQMNSLRAEDTAVYYCARYAEWYKYYLAMGYMGFDYWGQGTLVTVSSASTKGPSVFPLAPSSKSTSGGTAALGCLVKDYFPEPVTVSWNSGALTSGVHTFPAVLQSSGLYSLSSVVTVPSSSLGTQTYICNVNHKPSNTKVDKKVEPKSCDKTHTCPPCPAPEAAGGPSVFLFPPKPKDTLMISRTPEVTCVVVDVSHEDPEVKFNWYVDGVEVHNAKTKPREEQYNSTYRVVSVLTVLHQDWLNGKEYKCKVSNKALGAPIEKTISKAKGQPREPQVYTLPPIRELMTSNQVSLSCAVKGFYPSDIAVEWESNGQPENNYKTTPPVLDSDGSFFLVSKLTVDKSRWQQGNVFSCSVMHEALHNHYTQKSLSLSPGK

SEQ ID NO: 987 - protein, 5 aa, synthetic construct
  REGION 1..5: note = Ab0442 CDR H1
SYSIH

SEQ ID NO: 988 - protein, 17 aa, synthetic construct
  REGION 1..17: note = Ab0442 CDR H2
SISPYYGSTYYADSVKG

SEQ ID NO: 989 - protein, 18 aa, synthetic construct
  REGION 1..18: note = Ab0442 CDR H3
YAEWYKYYLAMGYMGFDY

SEQ ID NO: 990 - protein, 457 aa, synthetic construct
  REGION 1..457: note = Ab0443 HC Hole Fab-Fc
EVQLVESGGGLVQPGGSLRLSCAASGFNVSSYSIHWVRQAPGKGLEWVASISPYYGSTYYADSVKGRFTISADTSKNTAYLQMNSLRAEDTAVYYCARYAEWYKYYLYMGSMGFDYWGQGTLVTVSSASTKGPSVFPLAPSSKSTSGGTAALGCLVKDYFPEPVTVSWNSGALTSGVHTFPAVLQSSGLYSLSSVVTVPSSSLGTQTYICNVNHKPSNTKVDKKVEPKSCDKTHTCPPCPAPEAAGGPSVFLFPPKPKDTLMISRTPEVTCVVVDVSHEDPEVKFNWYVDGVEVHNAKTKPREEQYNSTYRVVSVLTVLHQDWLNGKEYKCKVSNKALGAPIEKTISKAKGQPREPQVYTLPPIRELMTSNQVSLSCAVKGFYPSDIAVEWESNGQPENNYKTTPPVLDSDGSFFLVSKLTVDKSRWQQGNVFSCSVMHEALHNHYTQKSLSLSPGK

SEQ ID NO: 991 - protein, 5 aa, synthetic construct
  REGION 1..5: note = Ab0443 CDR H1
SYSIH

SEQ ID NO: 992 - protein, 17 aa, synthetic construct
  REGION 1..17: note = Ab0443 CDR H2
SISPYYGSTYYADSVKG

SEQ ID NO: 993 - protein, 18 aa, synthetic construct
  REGION 1..18: note = Ab0443 CDR H3
YAEWYKYYLYMGSMGFDY

SEQ ID NO: 994 - protein, 457 aa, synthetic construct
  REGION 1..457: note = Ab0444 HC Hole Fab-Fc
EVQLVESGGGLVQPGGSLRLSCAASGFNVSSYSIHWVRQAPGKGLEWVASISPYYGSTYYADSVKGRFTISADTSKNTAYLQMNSLRAEDTAVYYCARYYEWYKYSLAMGYMGFDYWGQGTLVTVSSASTKGPSVFPLAPSSKSTSGGTAALGCLVKDYFPEPVTVSWNSGALTSGVHTFPAVLQSSGLYSLSSVVTVPSSSLGTQTYICNVNHKPSNTKVDKKVEPKSCDKTHTCPPCPAPEAAGGPSVFLFPPKPKDTLMISRTPEVTCVVVDVSHEDPEVKFNWYVDGVEVHNAKTKPREEQYNSTYRVVSVLTVLHQDWLNGKEYKCKVSNKALGAPIEKTISKAKGQPREPQVYTLPPIRELMTSNQVSLSCAVKGFYPSDIAVEWESNGQPENNYKTTPPVLDSDGSFFLVSKLTVDKSRWQQGNVFSCSVMHEALHNHYTQKSLSLSPGK

SEQ ID NO: 995 - protein, 5 aa, synthetic construct
  REGION 1..5: note = Ab0444 CDR H1
SYSIH

SEQ ID NO: 996 - protein, 17 aa, synthetic construct
  REGION 1..17: note = Ab0444 CDR H2
SISPYYGSTYYADSVKG

SEQ ID NO: 997 - protein, 18 aa, synthetic construct
  REGION 1..18: note = Ab0444 CDR H3
YYEWYKYSLAMGYMGFDY

SEQ ID NO: 998 - protein, 457 aa, synthetic construct
  REGION 1..457: note = Ab0445 HC Hole Fab-Fc
EVQLVESGGGLVQPGGSLRLSCAASGFNVSSYSIHWVRQAPGKGLEWVASISPYYGSTYYADSVKGRFTISADTSKNTAYLQMNSLRAEDTAVYYCARYYEWYKYSLYMGSMGFDYWGQGTLVTVSSASTKGPSVFPLAPSSKSTSGGTAALGCLVKDYFPEPVTVSWNSGALTSGVHTFPAVLQSSGLYSLSSVVTVPSSSLGTQTYICNVNHKPSNTKVDKKVEPKSCDKTHTCPPCPAPEAAGGPSVFLFPPKPKDTLMISRTPEVTCVVVDVSHEDPEVKFNWYVDGVEVHNAKTKPREEQYNSTYRVVSVLTVLHQDWLNGKEYKCKVSNKALGAPIEKTISKAKGQPREPQVYTLPPIRELMTSNQVSLSCAVKGFYPSDIAVEWESNGQPENNYKTTPPVLDSDGSFFLVSKLTVDKSRWQQGNVFSCSVMHEALHNHYTQKSLSLSPGK

SEQ ID NO: 999 - protein, 5 aa, synthetic construct
  REGION 1..5: note = Ab0445 CDR H1
SYSIH

SEQ ID NO: 1000 - protein, 17 aa, synthetic construct
  REGION 1..17: note = Ab0445 CDR H2
SISPYYGSTYYADSVKG

SEQ ID NO: 1001 - protein, 18 aa, synthetic construct
  REGION 1..18: note = Ab0445 CDR H3
YYEWYKYSLYMGSMGFDY

SEQ ID NO: 1002 - protein, 457 aa, synthetic construct
  REGION 1..457: note = Ab0446 HC Hole Fab-Fc
EVQLVESGGGLVQPGGSLRLSCAASGFNVSSYSIHWVRQAPGKGLEWVASISPYYGSTYYADSVKGRFTISADTSKNTAYLQMNSLRAEDTAVYYCARYYEWYKYYLAMGSMGFDYWGQGTLVTVSSASTKGPSVFPLAPSSKSTSGGTAALGCLVKDYFPEPVTVSWNSGALTSGVHTFPAVLQSSGLYSLSSVVTVPSSSLGTQTYICNVNHKPSNTKVDKKVEPKSCDKTHTCPPCPAPEAAGGPSVFLFPPKPKDTLMISRTPEVTCVVVDVSHEDPEVKFNWYVDGVEVHNAKTKPREEQYNSTYRVVSVLTVLHQDWLNGKEYKCKVSNKALGAPIEKTISKAKGQPREPQVYTLPPIRELMTSNQVSLSCAVKGFYPSDIAVEWESNGQPENNYKTTPPVLDSDGSFFLVSKLTVDKSRWQQGNVFSCSVMHEALHNHYTQKSLSLSPGK

SEQ ID NO: 1003 - protein, 5 aa, synthetic construct
  REGION 1..5: note = Ab0446 CDR H1
SYSIH

SEQ ID NO: 1004 - protein, 17 aa, synthetic construct
  REGION 1..17: note = Ab0446 CDR H2
SISPYYGSTYYADSVKG

SEQ ID NO: 1005 - protein, 18 aa, synthetic construct
  REGION 1..18: note = Ab0446 CDR H3
YYEWYKYYLAMGSMGFDY

SEQ ID NO: 1006 - protein, 457 aa, synthetic construct
  REGION 1..457: note = Ab0447 HC Hole Fab-Fc
EVQLVESGGGLVQPGGSLRLSCAASGFNVSSYSIHWVRQAPGKGLEWVASISPAYGSTYYADSVKGRFTISADTSKNTAYLQMNSLRAEDTAVYYCARYAEWYKYYLYMGYMGFDYWGQGTLVTVSSASTKGPSVFPLAPSSKSTSGGTAALGCLVKDYFPEPVTVSWNSGALTSGVHTFPAVLQSSGLYSLSSVVTVPSSSLGTQTYICNVNHKPSNTKVDKKVEPKSCDKTHTCPPCPAPEAAGGPSVFLFPPKPKDTLMISRTPEVTCVVVDVSHEDPEVKFNWYVDGVEVHNAKTKPREEQYNSTYRVVSVLTVLHQDWLNGKEYKCKVSNKALGAPIEKTISKAKGQPREPQVYTLPPIRELMTSNQVSLSCAVKGFYPSDIAVEWESNGQPENNYKTTPPVLDSDGSFFLVSKLTVDKSRWQQGNVFSCSVMHEALHNHYTQKSLSLSPGK

SEQ ID NO: 1007 - protein, 5 aa, synthetic construct
  REGION 1..5: note = Ab0447 CDR H1
SYSIH

SEQ ID NO: 1008 - protein, 17 aa, synthetic construct
  REGION 1..17: note = Ab0447 CDR H2
SISPAYGSTYYADSVKG

SEQ ID NO: 1009 - protein, 18 aa, synthetic construct
  REGION 1..18: note = Ab0447 CDR H3
YAEWYKYYLYMGYMGFDY

SEQ ID NO: 1010 - protein, 457 aa, synthetic construct
  REGION 1..457: note = Ab0448 HC Hole Fab-Fc
EVQLVESGGGLVQPGGSLRLSCAASGFNVSSYSIHWVRQAPGKGLEWVASISPAYGSTYYADSVKGRFTISADTSKNTAYLQMNSLRAEDTAVYYCARYYEWYKYSLYMGYMGFDYWGQGTLVTVSSASTKGPSVFPLAPSSKSTSGGTAALGCLVKDYFPEPVTVSWNSGALTSGVHTFPAVLQSSGLYSLSSVVTVPSSSLGTQTYICNVNHKPSNTKVDKKVEPKSCDKTHTCPPCPAPEAAGGPSVFLFPPKPKDTLMISRTPEVTCVVVDVSHEDPEVKFNWYVDGVEVHNAKTKPREEQYNSTYRVVSVLTVLHQDWLNGKEYKCKVSNKALGAPIEKTISKAKGQPREPQVYTLPPIRELMTSNQVSLSCAVKGFYPSDIAVEWESNGQPENNYKTTPPVLDSDGSFFLVSKLTVDKSRWQQGNVFSCSVMHEALHNHYTQKSLSLSPGK

SEQ ID NO: 1011 - protein, 5 aa, synthetic construct
  REGION 1..5: note = Ab0448 CDR H1
SYSIH

SEQ ID NO: 1012 - protein, 17 aa, synthetic construct
  REGION 1..17: note = Ab0448 CDR H2
SISPAYGSTYYADSVKG

SEQ ID NO: 1013 - protein, 18 aa, synthetic construct
  REGION 1..18: note = Ab0448 CDR H3
YYEWYKYSLYMGYMGFDY

SEQ ID NO: 1014 - protein, 457 aa, synthetic construct
  REGION 1..457: note = Ab0449 HC Hole Fab-Fc
EVQLVESGGGLVQPGGSLRLSCAASGFNVSSYSIHWVRQAPGKGLEWVASISPAYGSTYYADSVKGRFTISADTSKNTAYLQMNSLRAEDTAVYYCARYYEWYKYYLAMGYMGFDYWGQGTLVTVSSASTKGPSVFPLAPSSKSTSGGTAALGCLVKDYFPEPVTVSWNSGALTSGVHTFPAVLQSSGLYSLSSVVTVPSSSLGTQTYICNVNHKPSNTKVDKKVEPKSCDKTHTCPPCPAPEAAGGPSVFLFPPKPKDTLMISRTPEVTCVVVDVSHEDPEVKFNWYVDGVEVHNAKTKPREEQYNSTYRVVSVLTVLHQDWLNGKEYKCKVSNKALGAPIEKTISKAKGQPREPQVYTLPPIRELMTSNQVSLSCAVKGFYPSDIAVEWESNGQPENNYKTTPPVLDSDGSFFLVSKLTVDKSRWQQGNVFSCSVMHEALHNHYTQKSLSLSPGK

SEQ ID NO: 1015 - protein, 5 aa, synthetic construct
  REGION 1..5: note = Ab0449 CDR H1
SYSIH

SEQ ID NO: 1016 - protein, 17 aa, synthetic construct
  REGION 1..17: note = Ab0449 CDR H2
SISPAYGSTYYADSVKG

SEQ ID NO: 1017 - protein, 18 aa, synthetic construct
  REGION 1..18: note = Ab0449 CDR H3
YYEWYKYYLAMGYMGFDY

SEQ ID NO: 1018 - protein, 457 aa, synthetic construct
  REGION 1..457: note = Ab0450 HC Hole Fab-Fc
EVQLVESGGGLVQPGGSLRLSCAASGFNVSSYSIHWVRQAPGKGLEWVASISPAYGSTYYADSVKGRFTISADTSKNTAYLQMNSLRAEDTAVYYCARYYEWYKYYLYMGSMGFDYWGQGTLVTVSSASTKGPSVFPLAPSSKSTSGGTAALGCLVKDYFPEPVTVSWNSGALTSGVHTFPAVLQSSGLYSLSSVVTVPSSSLGTQTYICNVNHKPSNTKVDKKVEPKSCDKTHTCPPCPAPEAAGGPSVFLFPPKPKDTLMISRTPEVTCVVVDVSHEDPEVKFNWYVDGVEVHNAKTKPREEQYNSTYRVVSVLTVLHQDWLNGKEYKCKVSNKALGAPIEKTISKAKGQPREPQVYTLPPIRELMTSNQVSLSCAVKGFYPSDIAVEWESNGQPENNYKTTPPVLDSDGSFFLVSKLTVDKSRWQQGNVFSCSVMHEALHNHYTQKSLSLSPGK

SEQ ID NO: 1019 - protein, 5 aa, synthetic construct
  REGION 1..5: note = Ab0450 CDR H1
SYSIH

SEQ ID NO: 1020 - protein, 17 aa, synthetic construct
  REGION 1..17: note = Ab0450 CDR H2
SISPAYGSTYYADSVKG

SEQ ID NO: 1021 - protein, 18 aa, synthetic construct
  REGION 1..18: note = Ab0450 CDR H3
YYEWYKYYLYMGSMGFDY

SEQ ID NO: 1022 - protein, 457 aa, synthetic construct
  REGION 1..457: note = Ab0451 HC Hole Fab-Fc
EVQLVESGGGLVQPGGSLRLSCAASGFNVSSYSIHWVRQAPGKGLEWVASISPYYGSTYYADSVKGRFTISADTSKNTAYLQMNSLRAEDTAVYYCARYAEWYKYSLAMGYMGFDYWGQGTLVTVSSASTKGPSVFPLAPSSKSTSGGTAALGCLVKDYFPEPVTVSWNSGALTSGVHTFPAVLQSSGLYSLSSVVTVPSSSLGTQTYICNVNHKPSNTKVDKKVEPKSCDKTHTCPPCPAPEAAGGPSVFLFPPKPKDTLMISRTPEVTCVVVDVSHEDPEVKFNWYVDGVEVHNAKTKPREEQYNSTYRVVSVLTVLHQDWLNGKEYKCKVSNKALGAPIEKTISKAKGQPREPQVYTLPPIRELMTSNQVSLSCAVKGFYPSDIAVEWESNGQPENNYKTTPPVLDSDGSFFLVSKLTVDKSRWQQGNVFSCSVMHEALHNHYTQKSLSLSPGK

SEQ ID NO: 1023 - protein, 5 aa, synthetic construct
  REGION 1..5: note = Ab0451 CDR H1
SYSIH

SEQ ID NO: 1024 - protein, 17 aa, synthetic construct
  REGION 1..17: note = Ab0451 CDR H2
SISPYYGSTYYADSVKG

SEQ ID NO: 1025 - protein, 18 aa, synthetic construct
  REGION 1..18: note = Ab0451 CDR H3
YAEWYKYSLAMGYMGFDY

SEQ ID NO: 1026 - protein, 457 aa, synthetic construct
  REGION 1..457: note = Ab0452 HC Hole Fab-Fc
EVQLVESGGGLVQPGGSLRLSCAASGFNVSSYSIHWVRQAPGKGLEWVASISPYYGSTYYADSVKGRFTISADTSKNTAYLQMNSLRAEDTAVYYCARYAEWYKYSLYMGSMGFDYWGQGTLVTVSSASTKGPSVFPLAPSSKSTSGGTAALGCLVKDYFPEPVTVSWNSGALTSGVHTFPAVLQSSGLYSLSSVVTVPSSSLGTQTYICNVNHKPSNTKVDKKVEPKSCDKTHTCPPCPAPEAAGGPSVFLFPPKPKDTLMISRTPEVTCVVVDVSHEDPEVKFNWYVDGVEVHNAKTKPREEQYNSTYRVVSVLTVLHQDWLNGKEYKCKVSNKALGAPIEKTISKAKGQPREPQVYTLPPIRELMTSNQVSLSCAVKGFYPSDIAVEWESNGQPENNYKTTPPVLDSDGSFFLVSKLTVDKSRWQQGNVFSCSVMHEALHNHYTQKSLSLSPGK

SEQ ID NO: 1027 - protein, 5 aa, synthetic construct
  REGION 1..5: note = Ab0452 CDR H1
SYSIH

SEQ ID NO: 1028 - protein, 17 aa, synthetic construct
  REGION 1..17: note = Ab0452 CDR H2
SISPYYGSTYYADSVKG

SEQ ID NO: 1029 - protein, 18 aa, synthetic construct
  REGION 1..18: note = Ab0452 CDR H3
YAEWYKYSLYMGSMGFDY

SEQ ID NO: 1030 - protein, 457 aa, synthetic construct
  REGION 1..457: note = Ab0453 HC Hole Fab-Fc
EVQLVESGGGLVQPGGSLRLSCAASGFNVSSYSIHWVRQAPGKGLEWVASISPYYGSTYYADSVKGRFTISADTSKNTAYLQMNSLRAEDTAVYYCARYAEWYKYYLAMGSMGFDYWGQGTLVTVSSASTKGPSVFPLAPSSKSTSGGTAALGCLVKDYFPEPVTVSWNSGALTSGVHTFPAVLQSSGLYSLSSVVTVPSSSLGTQTYICNVNHKPSNTKVDKKVEPKSCDKTHTCPPCPAPEAAGGPSVFLFPPKPKDTLMISRTPEVTCVVVDVSHEDPEVKFNWYVDGVEVHNAKTKPREEQYNSTYRVVSVLTVLHQDWLNGKEYKCKVSNKALGAPIEKTISKAKGQPREPQVYTLPPIRELMTSNQVSLSCAVKGFYPSDIAVEWESNGQPENNYKTTPPVLDSDGSFFLVSKLTVDKSRWQQGNVFSCSVMHEALHNHYTQKSLSLSPGK

SEQ ID NO: 1031 - protein, 5 aa, synthetic construct
  REGION 1..5: note = Ab0453 CDR H1
SYSIH

SEQ ID NO: 1032 - protein, 17 aa, synthetic construct
  REGION 1..17: note = Ab0453 CDR H2
SISPYYGSTYYADSVKG

SEQ ID NO: 1033 - protein, 18 aa, synthetic construct
  REGION 1..18: note = Ab0453 CDR H3
YAEWYKYYLAMGSMGFDY

SEQ ID NO: 1034 - protein, 457 aa, synthetic construct
  REGION 1..457: note = Ab0454 HC Hole Fab-Fc
EVQLVESGGGLVQPGGSLRLSCAASGFNVSSYSIHWVRQAPGKGLEWVASISPYYGSTYYADSVKGRFTISADTSKNTAYLQMNSLRAEDTAVYYCARYYEWYKYSLAMGSMGFDYWGQGTLVTVSSASTKGPSVFPLAPSSKSTSGGTAALGCLVKDYFPEPVTVSWNSGALTSGVHTFPAVLQSSGLYSLSSVVTVPSSSLGTQTYICNVNHKPSNTKVDKKVEPKSCDKTHTCPPCPAPEAAGGPSVFLFPPKPKDTLMISRTPEVTCVVVDVSHEDPEVKFNWYVDGVEVHNAKTKPREEQYNSTYRVVSVLTVLHQDWLNGKEYKCKVSNKALGAPIEKTISKAKGQPREPQVYTLPPIRELMTSNQVSLSCAVKGFYPSDIAVEWESNGQPENNYKTTPPVLDSDGSFFLVSKLTVDKSRWQQGNVFSCSVMHEALHNHYTQKSLSLSPGK

SEQ ID NO: 1035 - protein, 5 aa, synthetic construct
  REGION 1..5: note = Ab0454 CDR H1
SYSIH

SEQ ID NO: 1036 - protein, 17 aa, synthetic construct
  REGION 1..17: note = Ab0545 CDR H2
SISPYYGSTYYADSVKG

SEQ ID NO: 1037 - protein, 18 aa, synthetic construct
  REGION 1..18: note = Ab0454 CDR H3
YYEWYKYSLAMGSMGFDY

SEQ ID NO: 1038 - protein, 457 aa, synthetic construct
  REGION 1..457: note = Ab0455 HC Hole Fab-Fc
EVQLVESGGGLVQPGGSLRLSCAASGFNVSSYSIHWVRQAPGKGLEWVASISPAYGSTYYADSVKGRFTISADTSKNTAYLQMNSLRAEDTAVYYCARYAEWYKYSLYMGYMGFDYWGQGTLVTVSSASTKGPSVFPLAPSSKSTSGGTAALGCLVKDYFPEPVTVSWNSGALTSGVHTFPAVLQSSGLYSLSSVVTVPSSSLGTQTYICNVNHKPSNTKVDKKVEPKSCDKTHTCPPCPAPEAAGGPSVFLFPPKPKDTLMISRTPEVTCVVVDVSHEDPEVKFNWYVDGVEVHNAKTKPREEQYNSTYRVVSVLTVLHQDWLNGKEYKCKVSNKALGAPIEKTISKAKGQPREPQVYTLPPIRELMTSNQVSLSCAVKGFYPSDIAVEWESNGQPENNYKTTPPVLDSDGSFFLVSKLTVDKSRWQQGNVFSCSVMHEALHNHYTQKSLSLSPGK

SEQ ID NO: 1039 - protein, 5 aa, synthetic construct
  REGION 1..5: note = Ab0455 CDR H1
SYSIH

SEQ ID NO: 1040 - protein, 17 aa, synthetic construct
  REGION 1..17: note = Ab0455 CDR H2
SISPAYGSTYYADSVKG

SEQ ID NO: 1041 - protein, 18 aa, synthetic construct
  REGION 1..18: note = Ab0455 CDR H3
YAEWYKYSLYMGYMGFDY

SEQ ID NO: 1042 - protein, 457 aa, synthetic construct
  REGION 1..457: note = Ab0456 HC Hole Fab-Fc
EVQLVESGGGLVQPGGSLRLSCAASGFNVSSYSIHWVRQAPGKGLEWVASISPAYGSTYYADSVKGRFTISADTSKNTAYLQMNSLRAEDTAVYYCARYAEWYKYYLAMGYMGFDYWGQGTLVTVSSASTKGPSVFPLAPSSKSTSGGTAALGCLVKDYFPEPVTVSWNSGALTSGVHTFPAVLQSSGLYSLSSVVTVPSSSLGTQTYICNVNHKPSNTKVDKKVEPKSCDKTHTCPPCPAPEAAGGPSVFLFPPKPKDTLMISRTPEVTCVVVDVSHEDPEVKFNWYVDGVEVHNAKTKPREEQYNSTYRVVSVLTVLHQDWLNGKEYKCKVSNKALGAPIEKTISKAKGQPREPQVYTLPPIRELMTSNQVSLSCAVKGFYPSDIAVEWESNGQPENNYKTTPPVLDSDGSFFLVSKLTVDKSRWQQGNVFSCSVMHEALHNHYTQKSLSLSPGK

SEQ ID NO: 1043 - protein, 5 aa, synthetic construct
  REGION 1..5: note = Ab0456 CDR H1
SYSIH

SEQ ID NO: 1044 - protein, 17 aa, synthetic construct
  REGION 1..17: note = Ab0456 CDR H2
SISPAYGSTYYADSVKG

SEQ ID NO: 1045 - protein, 18 aa, synthetic construct
  REGION 1..18: note = Ab0456 CDR H3
YAEWYKYYLAMGYMGFDY

SEQ ID NO: 1046 - protein, 457 aa, synthetic construct
  REGION 1..457: note = Ab0457 HC Hole Fab-Fc
EVQLVESGGGLVQPGGSLRLSCAASGFNVSSYSIHWVRQAPGKGLEWVASISPAYGSTYYADSVKGRFTISADTSKNTAYLQMNSLRAEDTAVYYCARYAEWYKYYLYMGSMGFDYWGQGTLVTVSSASTKGPSVFPLAPSSKSTSGGTAALGCLVKDYFPEPVTVSWNSGALTSGVHTFPAVLQSSGLYSLSSVVTVPSSSLGTQTYICNVNHKPSNTKVDKKVEPKSCDKTHTCPPCPAPEAAGGPSVFLFPPKPKDTLMISRTPEVTCVVVDVSHEDPEVKFNWYVDGVEVHNAKTKPREEQYNSTYRVVSVLTVLHQDWLNGKEYKCKVSNKALGAPIEKTISKAKGQPREPQVYTLPPIRELMTSNQVSLSCAVKGFYPSDIAVEWESNGQPENNYKTTPPVLDSDGSFFLVSKLTVDKSRWQQGNVFSCSVMHEALHNHYTQKSLSLSPGK

SEQ ID NO: 1047 - protein, 5 aa, synthetic construct
  REGION 1..5: note = Ab0457 CDR H1
SYSIH

SEQ ID NO: 1048 - protein, 17 aa, synthetic construct
  REGION 1..17: note = Ab0457 CDR H2
SISPAYGSTYYADSVKG

SEQ ID NO: 1049 - protein, 18 aa, synthetic construct
  REGION 1..18: note = Ab0457 CDR H3
YAEWYKYYLYMGSMGFDY

SEQ ID NO: 1050 - protein, 457 aa, synthetic construct
  REGION 1..457: note = Ab0458 HC Hole Fab-Fc
EVQLVESGGGLVQPGGSLRLSCAASGFNVSSYSIHWVRQAPGKGLEWVASISPAYGSTYYADSVKGRFTISADTSKNTAYLQMNSLRAEDTAVYYCARYYEWYKYSLAMGYMGFDYWGQGTLVTVSSASTKGPSVFPLAPSSKSTSGGTAALGCLVKDYFPEPVTVSWNSGALTSGVHTFPAVLQSSGLYSLSSVVTVPSSSLGTQTYICNVNHKPSNTKVDKKVEPKSCDKTHTCPPCPAPEAAGGPSVFLFPPKPKDTLMISRTPEVTCVVVDVSHEDPEVKFNWYVDGVEVHNAKTKPREEQYNSTYRVVSVLTVLHQDWLNGKEYKCKVSNKALGAPIEKTISKAKGQPREPQVYTLPPIRELMTSNQVSLSCAVKGFYPSDIAVEWESNGQPENNYKTTPPVLDSDGSFFLVSKLTVDKSRWQQGNVFSCSVMHEALHNHYTQKSLSLSPGK

SEQ ID NO: 1051 - protein, 5 aa, synthetic construct
  REGION 1..5: note = Ab0458 CDR H1
SYSIH

SEQ ID NO: 1052 - protein, 17 aa, synthetic construct
  REGION 1..17: note = Ab0458 CDR H2
SISPAYGSTYYADSVKG

SEQ ID NO: 1053 - protein, 18 aa, synthetic construct
  REGION 1..18: note = Ab0458 CDR H3
YYEWYKYSLAMGYMGFDY

SEQ ID NO: 1054 - protein, 457 aa, synthetic construct
  REGION 1..457: note = Ab0459 HC Hole Fab-Fc
EVQLVESGGGLVQPGGSLRLSCAASGFNVSSYSIHWVRQAPGKGLEWVASISPAYGSTYYADSVKGRFTISADTSKNTAYLQMNSLRAEDTAVYYCARYYEWYKYSLYMGSMGFDYWGQGTLVTVSSASTKGPSVFPLAPSSKSTSGGTAALGCLVKDYFPEPVTVSWNSGALTSGVHTFPAVLQSSGLYSLSSVVTVPSSSLGTQTYICNVNHKPSNTKVDKKVEPKSCDKTHTCPPCPAPEAAGGPSVFLFPPKPKDTLMISRTPEVTCVVVDVSHEDPEVKFNWYVDGVEVHNAKTKPREEQYNSTYRVVSVLTVLHQDWLNGKEYKCKVSNKALGAPIEKTISKAKGQPREPQVYTLPPIRELMTSNQVSLSCAVKGFYPSDIAVEWESNGQPENNYKTTPPVLDSDGSFFLVSKLTVDKSRWQQGNVFSCSVMHEALHNHYTQKSLSLSPGK

SEQ ID NO: 1055 - protein, 5 aa, synthetic construct
  REGION 1..5: note = Ab0459 CDR H1
SYSIH

SEQ ID NO: 1056 - protein, 17 aa, synthetic construct
  REGION 1..17: note = Ab0459 CDR H2
SISPAYGSTYYADSVKG

SEQ ID NO: 1057 - protein, 18 aa, synthetic construct
  REGION 1..18: note = Ab0459 CDR H3
YYEWYKYSLYMGSMGFDY

SEQ ID NO: 1058 - protein, 457 aa, synthetic construct
  REGION 1..457: note = Ab0460 HC Hole Fab-Fc
EVQLVESGGGLVQPGGSLRLSCAASGFNVSSYSIHWVRQAPGKGLEWVASISPAYGSTYYADSVKGRFTISADTSKNTAYLQMNSLRAEDTAVYYCARYYEWYKYYLAMGSMGFDYWGQGTLVTVSSASTKGPSVFPLAPSSKSTSGGTAALGCLVKDYFPEPVTVSWNSGALTSGVHTFPAVLQSSGLYSLSSVVTVPSSSLGTQTYICNVNHKPSNTKVDKKVEPKSCDKTHTCPPCPAPEAAGGPSVFLFPPKPKDTLMISRTPEVTCVVVDVSHEDPEVKFNWYVDGVEVHNAKTKPREEQYNSTYRVVSVLTVLHQDWLNGKEYKCKVSNKALGAPIEKTISKAKGQPREPQVYTLPPIRELMTSNQVSLSCAVKGFYPSDIAVEWESNGQPENNYKTTPPVLDSDGSFFLVSKLTVDKSRWQQGNVFSCSVMHEALHNHYTQKSLSLSPGK

SEQ ID NO: 1059 - protein, 5 aa, synthetic construct
  REGION 1..5: note = Ab0460 CDR H1
SYSIH

SEQ ID NO: 1060 - protein, 17 aa, synthetic construct
  REGION 1..17: note = Ab0460 CDR H2
SISPAYGSTYYADSVKG

SEQ ID NO: 1061 - protein, 18 aa, synthetic construct
  REGION 1..18: note = Ab0460 CDR H3
YYEWYKYYLAMGSMGFDY

SEQ ID NO: 1062 - protein, 457 aa, synthetic construct
  REGION 1..457: note = Ab0461 HC Hole Fab-Fc
EVQLVESGGGLVQPGGSLRLSCAASGFNVSSYSIHWVRQAPGKGLEWVASISPYYGSTYYADSVKGRFTISADTSKNTAYLQMNSLRAEDTAVYYCARYAEWYKYSLAMGSMGFDYWGQGTLVTVSSASTKGPSVFPLAPSSKSTSGGTAALGCLVKDYFPEPVTVSWNSGALTSGVHTFPAVLQSSGLYSLSSVVTVPSSSLGTQTYICNVNHKPSNTKVDKKVEPKSCDKTHTCPPCPAPEAAGGPSVFLFPPKPKDTLMISRTPEVTCVVVDVSHEDPEVKFNWYVDGVEVHNAKTKPREEQYNSTYRVVSVLTVLHQDWLNGKEYKCKVSNKALGAPIEKTISKAKGQPREPQVYTLPPIRELMTSNQVSLSCAVKGFYPSDIAVEWESNGQPENNYKTTPPVLDSDGSFFLVSKLTVDKSRWQQGNVFSCSVMHEALHNHYTQKSLSLSPGK

SEQ ID NO: 1063 - protein, 5 aa, synthetic construct
  REGION 1..5: note = Ab0461 CDR H1
SYSIH

SEQ ID NO: 1064 - protein, 17 aa, synthetic construct
  REGION 1..17: note = Ab0461 CDR H2
SISPYYGSTYYADSVKG

SEQ ID NO: 1065 - protein, 18 aa, synthetic construct
  REGION 1..18: note = Ab0461 CDR H3
YAEWYKYSLAMGSMGFDY

SEQ ID NO: 1066 - protein, 457 aa, synthetic construct
  REGION 1..457: note = Ab0462 HC Hole Fab-Fc
EVQLVESGGGLVQPGGSLRLSCAASGFNVSSYSIHWVRQAPGKGLEWVASISPAYGSTYYADSVKGRFTISADTSKNTAYLQMNSLRAEDTAVYYCARYAEWYKYSLAMGYMGFDYWGQGTLVTVSSASTKGPSVFPLAPSSKSTSGGTAALGCLVKDYFPEPVTVSWNSGALTSGVHTFPAVLQSSGLYSLSSVVTVPSSSLGTQTYICNVNHKPSNTKVDKKVEPKSCDKTHTCPPCPAPEAAGGPSVFLFPPKPKDTLMISRTPEVTCVVVDVSHEDPEVKFNWYVDGVEVHNAKTKPREEQYNSTYRVVSVLTVLHQDWLNGKEYKCKVSNKALGAPIEKTISKAKGQPREPQVYTLPPIRELMTSNQVSLSCAVKGFYPSDIAVEWESNGQPENNYKTTPPVLDSDGSFFLVSKLTVDKSRWQQGNVFSCSVMHEALHNHYTQKSLSLSPGK

SEQ ID NO: 1067 - protein, 5 aa, synthetic construct
  REGION 1..5: note = Ab0462 CDR H1
SYSIH

SEQ ID NO: 1068 - protein, 17 aa, synthetic construct
  REGION 1..17: note = Ab0462 CDR H2
SISPAYGSTYYADSVKG

SEQ ID NO: 1069 - protein, 18 aa, synthetic construct
  REGION 1..18: note = Ab0462 CDR H3
YAEWYKYSLAMGYMGFDY

SEQ ID NO: 1070 - protein, 457 aa, synthetic construct
  REGION 1..457: note = Ab0463 HC Hole Fab-Fc
EVQLVESGGGLVQPGGSLRLSCAASGFNVSSYSIHWVRQAPGKGLEWVASISPAYGSTYYADSVKGRFTISADTSKNTAYLQMNSLRAEDTAVYYCARYAEWYKYSLYMGSMGFDYWGQGTLVTVSSASTKGPSVFPLAPSSKSTSGGTAALGCLVKDYFPEPVTVSWNSGALTSGVHTFPAVLQSSGLYSLSSVVTVPSSSLGTQTYICNVNHKPSNTKVDKKVEPKSCDKTHTCPPCPAPEAAGGPSVFLFPPKPKDTLMISRTPEVTCVVVDVSHEDPEVKFNWYVDGVEVHNAKTKPREEQYNSTYRVVSVLTVLHQDWLNGKEYKCKVSNKALGAPIEKTISKAKGQPREPQVYTLPPIRELMTSNQVSLSCAVKGFYPSDIAVEWESNGQPENNYKTTPPVLDSDGSFFLVSKLTVDKSRWQQGNVFSCSVMHEALHNHYTQKSLSLSPGK

SEQ ID NO: 1071 - protein, 5 aa, synthetic construct
  REGION 1..5: note = Ab0463 CDR H1
SYSIH

SEQ ID NO: 1072 - protein, 17 aa, synthetic construct
  REGION 1..17: note = Ab0463 CDR H2
SISPAYGSTYYADSVKG

SEQ ID NO: 1073 - protein, 18 aa, synthetic construct
  REGION 1..18: note = Ab0463 CDR H3
YAEWYKYSLYMGSMGFDY

SEQ ID NO: 1074 - protein, 457 aa, synthetic construct
  REGION 1..457: note = Ab0464 HC Hole Fab-Fc
EVQLVESGGGLVQPGGSLRLSCAASGFNVSSYSIHWVRQAPGKGLEWVASISPAYGSTYYADSVKGRFTISADTSKNTAYLQMNSLRAEDTAVYYCARYAEWYKYYLAMGSMGFDYWGQGTLVTVSSASTKGPSVFPLAPSSKSTSGGTAALGCLVKDYFPEPVTVSWNSGALTSGVHTFPAVLQSSGLYSLSSVVTVPSSSLGTQTYICNVNHKPSNTKVDKKVEPKSCDKTHTCPPCPAPEAAGGPSVFLFPPKPKDTLMISRTPEVTCVVVDVSHEDPEVKFNWYVDGVEVHNAKTKPREEQYNSTYRVVSVLTVLHQDWLNGKEYKCKVSNKALGAPIEKTISKAKGQPREPQVYTLPPIRELMTSNQVSLSCAVKGFYPSDIAVEWESNGQPENNYKTTPPVLDSDGSFFLVSKLTVDKSRWQQGNVFSCSVMHEALHNHYTQKSLSLSPGK

SEQ ID NO: 1075 - protein, 5 aa, synthetic construct
  REGION 1..5: note = Ab0464 CDR H1
SYSIH

SEQ ID NO: 1076 - protein, 17 aa, synthetic construct
  REGION 1..17: note = Ab0464 CDR H2
SISPAYGSTYYADSVKG

SEQ ID NO: 1077 - protein, 18 aa, synthetic construct
  REGION 1..18: note = Ab0464 CDR H3
YAEWYKYYLAMGSMGFDY

SEQ ID NO: 1078 - protein, 457 aa, synthetic construct
  REGION 1..457: note = Ab0465 HC Hole Fab-Fc
EVQLVESGGGLVQPGGSLRLSCAASGFNVSSYSIHWVRQAPGKGLEWVASISPAYGSTYYADSVKGRFTISADTSKNTAYLQMNSLRAEDTAVYYCARYYEWYKYSLAMGSMGFDYWGQGTLVTVSSASTKGPSVFPLAPSSKSTSGGTAALGCLVKDYFPEPVTVSWNSGALTSGVHTFPAVLQSSGLYSLSSVVTVPSSSLGTQTYICNVNHKPSNTKVDKKVEPKSCDKTHTCPPCPAPEAAGGPSVFLFPPKPKDTLMISRTPEVTCVVVDVSHEDPEVKFNWYVDGVEVHNAKTKPREEQYNSTYRVVSVLTVLHQDWLNGKEYKCKVSNKALGAPIEKTISKAKGQPREPQVYTLPPIRELMTSNQVSLSCAVKGFYPSDIAVEWESNGQPENNYKTTPPVLDSDGSFFLVSKLTVDKSRWQQGNVFSCSVMHEALHNHYTQKSLSLSPGK

SEQ ID NO: 1079 - protein, 5 aa, synthetic construct
  REGION 1..5: note = Ab0465 CDR H1
SYSIH

SEQ ID NO: 1080 - protein, 17 aa, synthetic construct
  REGION 1..17: note = Ab0465 CDR H2
SISPAYGSTYYADSVKG

SEQ ID NO: 1081 - protein, 18 aa, synthetic construct
  REGION 1..18: note = Ab0465 CDR H3
YYEWYKYSLAMGSMGFDY

SEQ ID NO: 1082 - protein, 457 aa, synthetic construct
  REGION 1..457: note = Ab0466 HC Hole Fab-Fc
EVQLVESGGGLVQPGGSLRLSCAASGFNVSSYSIHWVRQAPGKGLEWVASISPAYGSTYYADSVKGRFTISADTSKNTAYLQMNSLRAEDTAVYYCARYAEWYKYSLAMGSMGFDYWGQGTLVTVSSASTKGPSVFPLAPSSKSTSGGTAALGCLVKDYFPEPVTVSWNSGALTSGVHTFPAVLQSSGLYSLSSVVTVPSSSLGTQTYICNVNHKPSNTKVDKKVEPKSCDKTHTCPPCPAPEAAGGPSVFLFPPKPKDTLMISRTPEVTCVVVDVSHEDPEVKFNWYVDGVEVHNAKTKPREEQYNSTYRVVSVLTVLHQDWLNGKEYKCKVSNKALGAPIEKTISKAKGQPREPQVYTLPPIRELMTSNQVSLSCAVKGFYPSDIAVEWESNGQPENNYKTTPPVLDSDGSFFLVSKLTVDKSRWQQGNVFSCSVMHEALHNHYTQKSLSLSPGK

SEQ ID NO: 1083 - protein, 5 aa, synthetic construct
  REGION 1..5: note = Ab0466 CDR H1
SYSIH

SEQ ID NO: 1084 - protein, 17 aa, synthetic construct
  REGION 1..17: note = Ab0466 CDR H2
SISPAYGSTYYADSVKG

SEQ ID NO: 1085 - protein, 18 aa, synthetic construct
  REGION 1..18: note = Ab0466 CDR H3
YAEWYKYSLAMGSMGFDY

SEQ ID NO: 1086 - protein, 457 aa, synthetic construct
  REGION 1..457: note = Ab0467 HC Hole Fab-Fc
EVQLVESGGGLVQPGGSLRLSCAASGFNVSSYSIHWVRQAPGKGLEWVASISPAAGSTYYADSVKGRFTISADTSKNTAYLQMNSLRAEDTAVYYCARYYEWYKYYLYMGYMGFDYWGQGTLVTVSSASTKGPSVFPLAPSSKSTSGGTAALGCLVKDYFPEPVTVSWNSGALTSGVHTFPAVLQSSGLYSLSSVVTVPSSSLGTQTYICNVNHKPSNTKVDKKVEPKSCDKTHTCPPCPAPEAAGGPSVFLFPPKPKDTLMISRTPEVTCVVVDVSHEDPEVKFNWYVDGVEVHNAKTKPREEQYNSTYRVVSVLTVLHQDWLNGKEYKCKVSNKALGAPIEKTISKAKGQPREPQVYTLPPIRELMTSNQVSLSCAVKGFYPSDIAVEWESNGQPENNYKTTPPVLDSDGSFFLVSKLTVDKSRWQQGNVFSCSVMHEALHNHYTQKSLSLSPGK

SEQ ID NO: 1087 - protein, 5 aa, synthetic construct
  REGION 1..5: note = Ab0467 CDR H1
SYSIH

SEQ ID NO: 1088 - protein, 17 aa, synthetic construct
  REGION 1..17: note = Ab0467 CDR H2
SISPAAGSTYYADSVKG

SEQ ID NO: 1089 - protein, 18 aa, synthetic construct
  REGION 1..18: note = Ab0467 CDR H3
YYEWYKYYLYMGYMGFDY

SEQ ID NO: 1090 - protein, 457 aa, synthetic construct
  REGION 1..457: note = Ab0468 HC Hole Fab-Fc
EVQLVESGGGLVQPGGSLRLSCAASGFNVSSYSIHWVRQAPGKGLEWVASISPYYGSTYYADSVKGRFTISADTSKNTAYLQMNSLRAEDTAVYYCARAAEWYKYYLYMGYMGFDYWGQGTLVTVSSASTKGPSVFPLAPSSKSTSGGTAALGCLVKDYFPEPVTVSWNSGALTSGVHTFPAVLQSSGLYSLSSVVTVPSSSLGTQTYICNVNHKPSNTKVDKKVEPKSCDKTHTCPPCPAPEAAGGPSVFLFPPKPKDTLMISRTPEVTCVVVDVSHEDPEVKFNWYVDGVEVHNAKTKPREEQYNSTYRVVSVLTVLHQDWLNGKEYKCKVSNKALGAPIEKTISKAKGQPREPQVYTLPPIRELMTSNQVSLSCAVKGFYPSDIAVEWESNGQPENNYKTTPPVLDSDGSFFLVSKLTVDKSRWQQGNVFSCSVMHEALHNHYTQKSLSLSPGK

SEQ ID NO: 1091 - protein, 5 aa, synthetic construct
  REGION 1..5: note = Ab0468 CDR H1
SYSIH

SEQ ID NO: 1092 - protein, 17 aa, synthetic construct
  REGION 1..17: note = Ab0468 CDR H2
SISPYYGSTYYADSVKG

SEQ ID NO: 1093 - protein, 18 aa, synthetic construct
  REGION 1..18: note = Ab0468 CDR H3
AAEWYKYYLYMGYMGFDY

SEQ ID NO: 1094 - protein, 457 aa, synthetic construct
  REGION 1..457: note = Ab0469 HC Hole Fab-Fc
EVQLVESGGGLVQPGGSLRLSCAASGFNVSSYSIHWVRQAPGKGLEWVASISPYYGSTYYADSVKGRFTISADTSKNTAYLQMNSLRAEDTAVYYCARYYEWYKSSLYMGYMGFDYWGQGTLVTVSSASTKGPSVFPLAPSSKSTSGGTAALGCLVKDYFPEPVTVSWNSGALTSGVHTFPAVLQSSGLYSLSSVVTVPSSSLGTQTYICNVNHKPSNTKVDKKVEPKSCDKTHTCPPCPAPEAAGGPSVFLFPPKPKDTLMISRTPEVTCVVVDVSHEDPEVKFNWYVDGVEVHNAKTKPREEQYNSTYRVVSVLTVLHQDWLNGKEYKCKVSNKALGAPIEKTISKAKGQPREPQVYTLPPIRELMTSNQVSLSCAVKGFYPSDIAVEWESNGQPENNYKTTPPVLDSDGSFFLVSKLTVDKSRWQQGNVFSCSVMHEALHNHYTQKSLSLSPGK

SEQ ID NO: 1095 - protein, 5 aa, synthetic construct
  REGION 1..5: note = Ab0469 CDR H1
SYSIH

SEQ ID NO: 1096 - protein, 17 aa, synthetic construct
  REGION 1..17: note = Ab0469 CDR H2
SISPYYGSTYYADSVKG

SEQ ID NO: 1097 - protein, 18 aa, synthetic construct
  REGION 1..18: note = Ab0469 CDR H3
YYEWYKSSLYMGYMGFDY

SEQ ID NO: 1098 - protein, 457 aa, synthetic construct
  REGION 1..457: note = Ab0470 HC Hole Fab-Fc
EVQLVESGGGLVQPGGSLRLSCAASGFNVSSYSIHWVRQAPGKGLEWVASISPYYGSTYYADSVKGRFTISADTSKNTAYLQMNSLRAEDTAVYYCARYYEWYKYYLALGYMGFDYWGQGTLVTVSSASTKGPSVFPLAPSSKSTSGGTAALGCLVKDYFPEPVTVSWNSGALTSGVHTFPAVLQSSGLYSLSSVVTVPSSSLGTQTYICNVNHKPSNTKVDKKVEPKSCDKTHTCPPCPAPEAAGGPSVFLFPPKPKDTLMISRTPEVTCVVVDVSHEDPEVKFNWYVDGVEVHNAKTKPREEQYNSTYRVVSVLTVLHQDWLNGKEYKCKVSNKALGAPIEKTISKAKGQPREPQVYTLPPIRELMTSNQVSLSCAVKGFYPSDIAVEWESNGQPENNYKTTPPVLDSDGSFFLVSKLTVDKSRWQQGNVFSCSVMHEALHNHYTQKSLSLSPGK

SEQ ID NO: 1099 - protein, 5 aa, synthetic construct
  REGION 1..5: note = Ab0470 CDR H1
SYSIH

SEQ ID NO: 1100 - protein, 17 aa, synthetic construct
  REGION 1..17: note = Ab0470 CDR H2
SISPYYGSTYYADSVKG

SEQ ID NO: 1101 - protein, 18 aa, synthetic construct
  REGION 1..18: note = Ab0470 CDR H3
YYEWYKYYLALGYMGFDY

SEQ ID NO: 1102 - protein, 457 aa, synthetic construct
  REGION 1..457: note = Ab0471 HC Hole Fab-Fc
EVQLVESGGGLVQPGGSLRLSCAASGFNVSSYSIHWVRQAPGKGLEWVASISPYYGSTYYADSVKGRFTISADTSKNTAYLQMNSLRAEDTAVYYCARYYEWYKYYLYMGSLGFDYWGQGTLVTVSSASTKGPSVFPLAPSSKSTSGGTAALGCLVKDYFPEPVTVSWNSGALTSGVHTFPAVLQSSGLYSLSSVVTVPSSSLGTQTYICNVNHKPSNTKVDKKVEPKSCDKTHTCPPCPAPEAAGGPSVFLFPPKPKDTLMISRTPEVTCVVVDVSHEDPEVKFNWYVDGVEVHNAKTKPREEQYNSTYRVVSVLTVLHQDWLNGKEYKCKVSNKALGAPIEKTISKAKGQPREPQVYTLPPIRELMTSNQVSLSCAVKGFYPSDIAVEWESNGQPENNYKTTPPVLDSDGSFFLVSKLTVDKSRWQQGNVFSCSVMHEALHNHYTQKSLSLSPGK

SEQ ID NO: 1103 - protein, 5 aa, synthetic construct
  REGION 1..5: note = Ab0471 CDR H1
SYSIH

SEQ ID NO: 1104 - protein, 17 aa, synthetic construct
  REGION 1..17: note = Ab0471 CDR H2
SISPYYGSTYYADSVKG

SEQ ID NO: 1105 - protein, 18 aa, synthetic construct
  REGION 1..18: note = Ab0471 CDR H3
YYEWYKYYLYMGSLGFDY

SEQ ID NO: 1106 - protein, 457 aa, synthetic construct
  REGION 1..457: note = Ab0472 HC Hole Fab-Fc
EVQLVESGGGLVQPGGSLRLSCAASGFNVASYSIHWVRQAPGKGLEWVASISPYYGSTYYADSVKGRFTISADTSKNTAYLQMNSLRAEDTAVYYCARYYEWYKYYLYMGYMGFDYWGQGTLVTVSSASTKGPSVFPLAPSSKSTSGGTAALGCLVKDYFPEPVTVSWNSGALTSGVHTFPAVLQSSGLYSLSSVVTVPSSSLGTQTYICNVNHKPSNTKVDKKVEPKSCDKTHTCPPCPAPEAAGGPSVFLFPPKPKDTLMISRTPEVTCVVVDVSHEDPEVKFNWYVDGVEVHNAKTKPREEQYNSTYRVVSVLTVLHQDWLNGKEYKCKVSNKALGAPIEKTISKAKGQPREPQVYTLPPIRELMTSNQVSLSCAVKGFYPSDIAVEWESNGQPENNYKTTPPVLDSDGSFFLVSKLTVDKSRWQQGNVFSCSVMHEALHNHYTQKSLSLSPGK

SEQ ID NO: 1107 - protein, 5 aa, synthetic construct
  REGION 1..5: note = Ab0472 CDR H1
SYSIH

SEQ ID NO: 1108 - protein, 17 aa, synthetic construct
  REGION 1..17: note = Ab0472 CDR H2
SISPYYGSTYYADSVKG

SEQ ID NO: 1109 - protein, 18 aa, synthetic construct
  REGION 1..18: note = Ab0472 CDR H3
YYEWYKYYLYMGYMGFDY

SEQ ID NO: 1110 - protein, 214 aa, synthetic construct; identical to SEQ ID NO: 857
  REGION 1..214: note = LC sequence

SEQ ID NO: 1111 - protein, 11 aa, synthetic construct
  REGION 1..11: note = CDR L1
RASQSVSSAVA

SEQ ID NO: 1112 - protein, 7 aa, synthetic construct
  REGION 1..7: note = CDR L2
SASSLYS

SEQ ID NO: 1113 - protein, 9 aa, synthetic construct
  REGION 1..9: note = CDR L3
QQGGYSLIT

SEQ ID NO: 1114 - protein, 238 aa, synthetic construct; identical to SEQ ID NO: 52
  REGION 1..238: note = Knob Fc-6xHis

SEQ ID NO: 1115 - protein, 457 aa, synthetic construct
  REGION 1..457: note = Ab0595 HC Hole Fab-Fc
EVQLVESGGGLVQPGGSLRLSCAASGFNVASYSIHWVRQAPGKGLEWVASISPYYGSTYYADSVKGRFTISADTSKNTAYLQMNSLRAEDTAVYYCARYYEWYKYSLYMGSMGFDYWGQGTLVTVSSASTKGPSVFPLAPSSKSTSGGTAALGCLVKDYFPEPVTVSWNSGALTSGVHTFPAVLQSSGLYSLSSVVTVPSSSLGTQTYICNVNHKPSNTKVDKKVEPKSCDKTHTCPPCPAPEAAGGPSVFLFPPKPKDTLMISRTPEVTCVVVDVSHEDPEVKFNWYVDGVEVHNAKTKPREEQYNSTYRVVSVLTVLHQDWLNGKEYKCKVSNKALGAPIEKTISKAKGQPREPQVYTLPPIRELMTSNQVSLSCAVKGFYPSDIAVEWESNGQPENNYKTTPPVLDSDGSFFLVSKLTVDKSRWQQGNVFSCSVMHEALHNHYTQKSLSLSPGK

SEQ ID NO: 1116 - protein, 5 aa, synthetic construct
  REGION 1..5: note = Ab0595 CDR H1
SYSIH

SEQ ID NO: 1117 - protein, 17 aa, synthetic construct
  REGION 1..17: note = Ab0595 CDR H2
SISPYYGSTYYADSVKG

SEQ ID NO: 1118 - protein, 18 aa, synthetic construct
  REGION 1..18: note = Ab0595 CDR H3
YYEWYKYSLYMGSMGFDY

SEQ ID NO: 1119 - protein, 457 aa, synthetic construct
  REGION 1..457: note = Ab0596 HC Hole Fab-Fc
EVQLVESGGGLVQPGGSLRLSCAASGFDVSSYSIHWVRQAPGKGLEWVASISPYYGSTYYADSVKGRFTISADTSKNTAYLQMNSLRAEDTAVYYCARYYEWYKYSLYMGSMGFDYWGQGTLVTVSSASTKGPSVFPLAPSSKSTSGGTAALGCLVKDYFPEPVTVSWNSGALTSGVHTFPAVLQSSGLYSLSSVVTVPSSSLGTQTYICNVNHKPSNTKVDKKVEPKSCDKTHTCPPCPAPEAAGGPSVFLFPPKPKDTLMISRTPEVTCVVVDVSHEDPEVKFNWYVDGVEVHNAKTKPREEQYNSTYRVVSVLTVLHQDWLNGKEYKCKVSNKALGAPIEKTISKAKGQPREPQVYTLPPIRELMTSNQVSLSCAVKGFYPSDIAVEWESNGQPENNYKTTPPVLDSDGSFFLVSKLTVDKSRWQQGNVFSCSVMHEALHNHYTQKSLSLSPGK

SEQ ID NO: 1120 - protein, 5 aa, synthetic construct
  REGION 1..5: note = Ab0596 CDR H1
SYSIH

SEQ ID NO: 1121 - protein, 17 aa, synthetic construct
  REGION 1..17: note = Ab0596 CDR H2
SISPYYGSTYYADSVKG

SEQ ID NO: 1122 - protein, 18 aa, synthetic construct
  REGION 1..18: note = Ab0596 CDR H3
YYEWYKYSLYMGSMGFDY

SEQ ID NO: 1123 - protein, 457 aa, synthetic construct
  REGION 1..457: note = Ab0597 HC Hole Fab-Fc
EVQLVESGGGLVQPGGSLRLSCAASGFEVSSYSIHWVRQAPGKGLEWVASISPYYGSTYYADSVKGRFTISADTSKNTAYLQMNSLRAEDTAVYYCARYYEWYKYSLYMGSMGFDYWGQGTLVTVSSASTKGPSVFPLAPSSKSTSGGTAALGCLVKDYFPEPVTVSWNSGALTSGVHTFPAVLQSSGLYSLSSVVTVPSSSLGTQTYICNVNHKPSNTKVDKKVEPKSCDKTHTCPPCPAPEAAGGPSVFLFPPKPKDTLMISRTPEVTCVVVDVSHEDPEVKFNWYVDGVEVHNAKTKPREEQYNSTYRVVSVLTVLHQDWLNGKEYKCKVSNKALGAPIEKTISKAKGQPREPQVYTLPPIRELMTSNQVSLSCAVKGFYPSDIAVEWESNGQPENNYKTTPPVLDSDGSFFLVSKLTVDKSRWQQGNVFSCSVMHEALHNHYTQKSLSLSPGK

SEQ ID NO: 1124 - protein, 5 aa, synthetic construct
  REGION 1..5: note = Ab0597 CDR H1
SYSIH

SEQ ID NO: 1125 - protein, 17 aa, synthetic construct
  REGION 1..17: note = Ab0597 CDR H2
SISPYYGSTYYADSVKG

SEQ ID NO: 1126 - protein, 18 aa, synthetic construct
  REGION 1..18: note = Ab0597 CDR H3
YYEWYKYSLYMGSMGFDY

SEQ ID NO: 1127 - protein, 457 aa, synthetic construct
  REGION 1..457: note = Ab0600 HC Hole Fab-Fc
EVQLVESGGGLVQPGGSLRLSCAASGFTVSSYSIHWVRQAPGKGLEWVASISPYYGSTYYADSVKGRFTISADTSKNTAYLQMNSLRAEDTAVYYCARYYEWYKYSLYMGSMGFDYWGQGTLVTVSSASTKGPSVFPLAPSSKSTSGGTAALGCLVKDYFPEPVTVSWNSGALTSGVHTFPAVLQSSGLYSLSSVVTVPSSSLGTQTYICNVNHKPSNTKVDKKVEPKSCDKTHTCPPCPAPEAAGGPSVFLFPPKPKDTLMISRTPEVTCVVVDVSHEDPEVKFNWYVDGVEVHNAKTKPREEQYNSTYRVVSVLTVLHQDWLNGKEYKCKVSNKALGAPIEKTISKAKGQPREPQVYTLPPIRELMTSNQVSLSCAVKGFYPSDIAVEWESNGQPENNYKTTPPVLDSDGSFFLVSKLTVDKSRWQQGNVFSCSVMHEALHNHYTQKSLSLSPGK

SEQ ID NO: 1128 - protein, 5 aa, synthetic construct
  REGION 1..5: note = CDR H1
SYSIH

SEQ ID NO: 1129 - protein, 17 aa, synthetic construct
  REGION 1..17: note = Ab0600 CDR H2
SISPYYGSTYYADSVKG

SEQ ID NO: 1130 - protein, 18 aa, synthetic construct
  REGION 1..18: note = Ab0600 CDR H3
YYEWYKYSLYMGSMGFDY

SEQ ID NO: 1131 - protein, 457 aa, synthetic construct
  REGION 1..457: note = Ab0601 HC Hole Fab-Fc
EVQLVESGGGLVQPGGSLRLSCAASGFNVKSYSIHWVRQAPGKGLEWVASISPYYGSTYYADSVKGRFTISADTSKNTAYLQMNSLRAEDTAVYYCARYYEWYKYSLYMGSMGFDYWGQGTLVTVSSASTKGPSVFPLAPSSKSTSGGTAALGCLVKDYFPEPVTVSWNSGALTSGVHTFPAVLQSSGLYSLSSVVTVPSSSLGTQTYICNVNHKPSNTKVDKKVEPKSCDKTHTCPPCPAPEAAGGPSVFLFPPKPKDTLMISRTPEVTCVVVDVSHEDPEVKFNWYVDGVEVHNAKTKPREEQYNSTYRVVSVLTVLHQDWLNGKEYKCKVSNKALGAPIEKTISKAKGQPREPQVYTLPPIRELMTSNQVSLSCAVKGFYPSDIAVEWESNGQPENNYKTTPPVLDSDGSFFLVSKLTVDKSRWQQGNVFSCSVMHEALHNHYTQKSLSLSPGK

SEQ ID NO: 1132 - protein, 5 aa, synthetic construct
  REGION 1..5: note = Ab0601 CDR H1
SYSIH

SEQ ID NO: 1133 - protein, 17 aa, synthetic construct
  REGION 1..17: note = Ab0601 CDR H2
SISPYYGSTYYADSVKG

SEQ ID NO: 1134 - protein, 18 aa, synthetic construct
  REGION 1..18: note = Ab0601 CDR H3
YYEWYKYSLYMGSMGFDY

SEQ ID NO: 1135 - protein, 457 aa, synthetic construct
  REGION 1..457: note = Ab0602 HC Hole Fab-Fc
EVQLVESGGGLVQPGGSLRLSCAASGFNIKSYSIHWVRQAPGKGLEWVASISPYYGSTYYADSVKGRFTISADTSKNTAYLQMNSLRAEDTAVYYCARYYEWYKYSLYMGSMGFDYWGQGTLVTVSSASTKGPSVFPLAPSSKSTSGGTAALGCLVKDYFPEPVTVSWNSGALTSGVHTFPAVLQSSGLYSLSSVVTVPSSSLGTQTYICNVNHKPSNTKVDKKVEPKSCDKTHTCPPCPAPEAAGGPSVFLFPPKPKDTLMISRTPEVTCVVVDVSHEDPEVKFNWYVDGVEVHNAKTKPREEQYNSTYRVVSVLTVLHQDWLNGKEYKCKVSNKALGAPIEKTISKAKGQPREPQVYTLPPIRELMTSNQVSLSCAVKGFYPSDIAVEWESNGQPENNYKTTPPVLDSDGSFFLVSKLTVDKSRWQQGNVFSCSVMHEALHNHYTQKSLSLSPGK

SEQ ID NO: 1136 - protein, 5 aa, synthetic construct
  REGION 1..5: note = Ab0602 CDR H1
SYSIH

SEQ ID NO: 1137 - protein, 17 aa, synthetic construct
  REGION 1..17: note = Ab0602 CDR H2
SISPYYGSTYYADSVKG

SEQ ID NO: 1138 - protein, 18 aa, synthetic construct
  REGION 1..18: note = Ab0602 CDR H3
YYEWYKYSLYMGSMGFDY

SEQ ID NO: 1139 - protein, 457 aa, synthetic construct
  REGION 1..457: note = Ab0603 HC Hole Fab-Fc
EVQLVESGGGLVQPGGSLRLSCAASGFTFSSYSIHWVRQAPGKGLEWVASISPYYGSTYYADSVKGRFTISADTSKNTAYLQMNSLRAEDTAVYYCARYYEWYKYSLYMGSMGFDYWGQGTLVTVSSASTKGPSVFPLAPSSKSTSGGTAALGCLVKDYFPEPVTVSWNSGALTSGVHTFPAVLQSSGLYSLSSVVTVPSSSLGTQTYICNVNHKPSNTKVDKKVEPKSCDKTHTCPPCPAPEAAGGPSVFLFPPKPKDTLMISRTPEVTCVVVDVSHEDPEVKFNWYVDGVEVHNAKTKPREEQYNSTYRVVSVLTVLHQDWLNGKEYKCKVSNKALGAPIEKTISKAKGQPREPQVYTLPPIRELMTSNQVSLSCAVKGFYPSDIAVEWESNGQPENNYKTTPPVLDSDGSFFLVSKLTVDKSRWQQGNVFSCSVMHEALHNHYTQKSLSLSPGK

SEQ ID NO: 1140 - protein, 5 aa, synthetic construct
  REGION 1..5: note = Ab0603 CDR H1
SYSIH

SEQ ID NO: 1141 - protein, 17 aa, synthetic construct
  REGION 1..17: note = Ab0603 CDR H2
SISPYYGSTYYADSVKG

SEQ ID NO: 1142 - protein, 18 aa, synthetic construct
  REGION 1..18: note = Ab0603 CDR H3
YYEWYKYSLYMGSMGFDY

SEQ ID NO: 1143 - protein, 457 aa, synthetic construct
  REGION 1..457: note = Ab0604 HC Hole Fab-Fc
EVQLVESGGGLVQPGGSLRLSCAASGFTFSSYAMSWVRQAPGKGLEWVASISPYYGSTYYADSVKGRFTISADTSKNTAYLQMNSLRAEDTAVYYCARYYEWYKYSLYMGSMGFDYWGQGTLVTVSSASTKGPSVFPLAPSSKSTSGGTAALGCLVKDYFPEPVTVSWNSGALTSGVHTFPAVLQSSGLYSLSSVVTVPSSSLGTQTYICNVNHKPSNTKVDKKVEPKSCDKTHTCPPCPAPEAAGGPSVFLFPPKPKDTLMISRTPEVTCVVVDVSHEDPEVKFNWYVDGVEVHNAKTKPREEQYNSTYRVVSVLTVLHQDWLNGKEYKCKVSNKALGAPIEKTISKAKGQPREPQVYTLPPIRELMTSNQVSLSCAVKGFYPSDIAVEWESNGQPENNYKTTPPVLDSDGSFFLVSKLTVDKSRWQQGNVFSCSVMHEALHNHYTQKSLSLSPGK

SEQ ID NO: 1144 - protein, 5 aa, synthetic construct
  REGION 1..5: note = Ab0604 CDR H1
SYAMS

SEQ ID NO: 1145 - protein, 17 aa, synthetic construct
  REGION 1..17: note = Ab0604 CDR H2
SISPYYGSTYYADSVKG

SEQ ID NO: 1146 - protein, 18 aa, synthetic construct
  REGION 1..18: note = Ab0604 CDR H3
YYEWYKYSLYMGSMGFDY

SEQ ID NO: 1147 - protein, 457 aa, synthetic construct
  REGION 1..457: note = Ab0605 HC Hole Fab-Fc
EVQLVESGGGLVQPGGSLRLSCAASGFNIKDTYIHWVRQAPGKGLEWVASISPYYGSTYYADSVKGRFTISADTSKNTAYLQMNSLRAEDTAVYYCARYYEWYKYSLYMGSMGFDYWGQGTLVTVSSASTKGPSVFPLAPSSKSTSGGTAALGCLVKDYFPEPVTVSWNSGALTSGVHTFPAVLQSSGLYSLSSVVTVPSSSLGTQTYICNVNHKPSNTKVDKKVEPKSCDKTHTCPPCPAPEAAGGPSVFLFPPKPKDTLMISRTPEVTCVVVDVSHEDPEVKFNWYVDGVEVHNAKTKPREEQYNSTYRVVSVLTVLHQDWLNGKEYKCKVSNKALGAPIEKTISKAKGQPREPQVYTLPPIRELMTSNQVSLSCAVKGFYPSDIAVEWESNGQPENNYKTTPPVLDSDGSFFLVSKLTVDKSRWQQGNVFSCSVMHEALHNHYTQKSLSLSPGK

SEQ ID NO: 1148 - protein, 5 aa, synthetic construct
  REGION 1..5: note = Ab0605 CDR H1
DTYIH

SEQ ID NO: 1149 - protein, 17 aa, synthetic construct
  REGION 1..17: note = Ab0605 CDR H2
SISPYYGSTYYADSVKG

SEQ ID NO: 1150 - protein, 18 aa, synthetic construct
  REGION 1..18: note = Ab0605 CDR H3
YYEWYKYSLYMGSMGFDY

SEQ ID NO: 1151 - protein, 457 aa, synthetic construct
  REGION 1..457: note = Ab0606 HC Hole Fab-Fc
EVQLVESGGGLVQPGGSLRLSCAASGFNVSSYSIHWVRQAPGKGLEWVASISPYYGSTYYADSVKGRFTISADTSKNTAYLQMNSLRAEDTAVYYCARYYELYKYSLYMGSMGFDYWGQGTLVTVSSASTKGPSVFPLAPSSKSTSGGTAALGCLVKDYFPEPVTVSWNSGALTSGVHTFPAVLQSSGLYSLSSVVTVPSSSLGTQTYICNVNHKPSNTKVDKKVEPKSCDKTHTCPPCPAPEAAGGPSVFLFPPKPKDTLMISRTPEVTCVVVDVSHEDPEVKFNWYVDGVEVHNAKTKPREEQYNSTYRVVSVLTVLHQDWLNGKEYKCKVSNKALGAPIEKTISKAKGQPREPQVYTLPPIRELMTSNQVSLSCAVKGFYPSDIAVEWESNGQPENNYKTTPPVLDSDGSFFLVSKLTVDKSRWQQGNVFSCSVMHEALHNHYTQKSLSLSPGK

SEQ ID NO: 1152 - protein, 5 aa, synthetic construct
  REGION 1..5: note = Ab0606 CDR H1
SYSIH

SEQ ID NO: 1153 - protein, 17 aa, synthetic construct
  REGION 1..17: note = Ab0606 CDR H2
SISPYYGSTYYADSVKG

SEQ ID NO: 1154 - protein, 18 aa, synthetic construct
  REGION 1..18: note = Ab0606 CDR H3
YYELYKYSLYMGSMGFDY

SEQ ID NO: 1155 - protein, 457 aa, synthetic construct
  REGION 1..457: note = Ab0607 HC Hole Fab-Fc
EVQLVESGGGLVQPGGSLRLSCAASGFNVSSYSIHWVRQAPGKGLEWVASISPYYGSTYYADSVKGRFTISADTSKNTAYLQMNSLRAEDTAVYYCARYYEFYKYSLYMGSMGFDYWGQGTLVTVSSASTKGPSVFPLAPSSKSTSGGTAALGCLVKDYFPEPVTVSWNSGALTSGVHTFPAVLQSSGLYSLSSVVTVPSSSLGTQTYICNVNHKPSNTKVDKKVEPKSCDKTHTCPPCPAPEAAGGPSVFLFPPKPKDTLMISRTPEVTCVVVDVSHEDPEVKFNWYVDGVEVHNAKTKPREEQYNSTYRVVSVLTVLHQDWLNGKEYKCKVSNKALGAPIEKTISKAKGQPREPQVYTLPPIRELMTSNQVSLSCAVKGFYPSDIAVEWESNGQPENNYKTTPPVLDSDGSFFLVSKLTVDKSRWQQGNVFSCSVMHEALHNHYTQKSLSLSPGK

SEQ ID NO: 1156 - protein, 5 aa, synthetic construct
  REGION 1..5: note = Ab0607 CDR H1
SYSIH

SEQ ID NO: 1157 - protein, 17 aa, synthetic construct
  REGION 1..17: note = Ab0607 CDR H2
SISPYYGSTYYADSVKG

SEQ ID NO: 1158 - protein, 18 aa, synthetic construct
  REGION 1..18: note = Ab0607 CDR H3
YYEFYKYSLYMGSMGFDY

SEQ ID NO: 1159 - protein, 457 aa, synthetic construct
  REGION 1..457: note = Ab0608 HC Hole Fab-Fc
EVQLVESGGGLVQPGGSLRLSCAASGFNVSSYSIHWVRQAPGKGLEWVASISPYYGSTYYADSVKGRFTISADTSKNTAYLQMNSLRAEDTAVYYCARYYEYYKYSLYMGSMGFDYWGQGTLVTVSSASTKGPSVFPLAPSSKSTSGGTAALGCLVKDYFPEPVTVSWNSGALTSGVHTFPAVLQSSGLYSLSSVVTVPSSSLGTQTYICNVNHKPSNTKVDKKVEPKSCDKTHTCPPCPAPEAAGGPSVFLFPPKPKDTLMISRTPEVTCVVVDVSHEDPEVKFNWYVDGVEVHNAKTKPREEQYNSTYRVVSVLTVLHQDWLNGKEYKCKVSNKALGAPIEKTISKAKGQPREPQVYTLPPIRELMTSNQVSLSCAVKGFYPSDIAVEWESNGQPENNYKTTPPVLDSDGSFFLVSKLTVDKSRWQQGNVFSCSVMHEALHNHYTQKSLSLSPGK

SEQ ID NO: 1160 - protein, 5 aa, synthetic construct
  REGION 1..5: note = Ab0608 CDR H1
SYSIH

SEQ ID NO: 1161 - protein, 17 aa, synthetic construct
  REGION 1..17: note = Ab0608 CDR H2
SISPYYGSTYYADSVKG

SEQ ID NO: 1162 - protein, 18 aa, synthetic construct
  REGION 1..18: note = Ab0608 CDR H3
YYEYYKYSLYMGSMGFDY

SEQ ID NO: 1163 - protein, 457 aa, synthetic construct
  REGION 1..457: note = Ab0609 HC Hole Fab-Fc
EVQLVESGGGLVQPGGSLRLSCAASGFNVSSYSIHWVRQAPGKGLEWVASISPYYGSTYYADSVKGRFTISADTSKNTAYLQMNSLRAEDTAVYYCARYYEHYKYSLYMGSMGFDYWGQGTLVTVSSASTKGPSVFPLAPSSKSTSGGTAALGCLVKDYFPEPVTVSWNSGALTSGVHTFPAVLQSSGLYSLSSVVTVPSSSLGTQTYICNVNHKPSNTKVDKKVEPKSCDKTHTCPPCPAPEAAGGPSVFLFPPKPKDTLMISRTPEVTCVVVDVSHEDPEVKFNWYVDGVEVHNAKTKPREEQYNSTYRVVSVLTVLHQDWLNGKEYKCKVSNKALGAPIEKTISKAKGQPREPQVYTLPPIRELMTSNQVSLSCAVKGFYPSDIAVEWESNGQPENNYKTTPPVLDSDGSFFLVSKLTVDKSRWQQGNVFSCSVMHEALHNHYTQKSLSLSPGK

SEQ ID NO: 1164 - protein, 5 aa, synthetic construct
  REGION 1..5: note = Ab0609 CDR H1
SYSIH

SEQ ID NO: 1165 - protein, 17 aa, synthetic construct
  REGION 1..17: note = Ab0609 CDR H2
SISPYYGSTYYADSVKG

SEQ ID NO: 1166 - protein, 18 aa, synthetic construct
  REGION 1..18: note = Ab0609 CDR H3
YYEHYKYSLYMGSMGFDY

SEQ ID NO: 1167 - protein, 457 aa, synthetic construct
  REGION 1..457: note = Ab0610 HC Hole Fab-Fc
EVQLVESGGGLVQPGGSLRLSCAASGFNVSSYSIHWVRQAPGKGLEWVASISPYYGSTYYADSVKGRFTISADTSKNTAYLQMNSLRAEDTAVYYCARYYEWYKYSLYLGSMGFDYWGQGTLVTVSSASTKGPSVFPLAPSSKSTSGGTAALGCLVKDYFPEPVTVSWNSGALTSGVHTFPAVLQSSGLYSLSSVVTVPSSSLGTQTYICNVNHKPSNTKVDKKVEPKSCDKTHTCPPCPAPEAAGGPSVFLFPPKPKDTLMISRTPEVTCVVVDVSHEDPEVKFNWYVDGVEVHNAKTKPREEQYNSTYRVVSVLTVLHQDWLNGKEYKCKVSNKALGAPIEKTISKAKGQPREPQVYTLPPIRELMTSNQVSLSCAVKGFYPSDIAVEWESNGQPENNYKTTPPVLDSDGSFFLVSKLTVDKSRWQQGNVFSCSVMHEALHNHYTQKSLSLSPGK

SEQ ID NO: 1168 - protein, 5 aa, synthetic construct
  REGION 1..5: note = Ab0610 CDR H1
SYSIH

SEQ ID NO: 1169 - protein, 17 aa, synthetic construct
  REGION 1..17: note = Ab0610 CDR H2
SISPYYGSTYYADSVKG

SEQ ID NO: 1170 - protein, 18 aa, synthetic construct
  REGION 1..18: note = Ab0610 CDR H3
YYEWYKYSLYLGSMGFDY

SEQ ID NO: 1171 - protein, 457 aa, synthetic construct
  REGION 1..457: note = Ab0611 HC Hole Fab-Fc
EVQLVESGGGLVQPGGSLRLSCAASGFNVSSYSIHWVRQAPGKGLEWVASISPYYGSTYYADSVKGRFTISADTSKNTAYLQMNSLRAEDTAVYYCARYYEWYKYSLYMGSLGFDYWGQGTLVTVSSASTKGPSVFPLAPSSKSTSGGTAALGCLVKDYFPEPVTVSWNSGALTSGVHTFPAVLQSSGLYSLSSVVTVPSSSLGTQTYICNVNHKPSNTKVDKKVEPKSCDKTHTCPPCPAPEAAGGPSVFLFPPKPKDTLMISRTPEVTCVVVDVSHEDPEVKFNWYVDGVEVHNAKTKPREEQYNSTYRVVSVLTVLHQDWLNGKEYKCKVSNKALGAPIEKTISKAKGQPREPQVYTLPPIRELMTSNQVSLSCAVKGFYPSDIAVEWESNGQPENNYKTTPPVLDSDGSFFLVSKLTVDKSRWQQGNVFSCSVMHEALHNHYTQKSLSLSPGK

SEQ ID NO: 1172 - protein, 5 aa, synthetic construct
  REGION 1..5: note = Ab0611 CDR H1
SYSIH

SEQ ID NO: 1173 - protein, 17 aa, synthetic construct
  REGION 1..17: note = Ab0611 CDR H2
SISPYYGSTYYADSVKG

SEQ ID NO: 1174 - protein, 18 aa, synthetic construct
  REGION 1..18: note = Ab0611 CDR H3
YYEWYKYSLYMGSLGFDY

SEQ ID NO: 1175 - protein, 457 aa, synthetic construct
  REGION 1..457: note = Ab0612 HC Hole Fab-Fc
EVQLVESGGGLVQPGGSLRLSCAASGFNVSSYSIHWVRQAPGKGLEWVASISPYYGSTYYADSVKGRFTISADTSKNTAYLQMNSLRAEDTAVYYCARYYEWYKYSLYLGSLGFDYWGQGTLVTVSSASTKGPSVFPLAPSSKSTSGGTAALGCLVKDYFPEPVTVSWNSGALTSGVHTFPAVLQSSGLYSLSSVVTVPSSSLGTQTYICNVNHKPSNTKVDKKVEPKSCDKTHTCPPCPAPEAAGGPSVFLFPPKPKDTLMISRTPEVTCVVVDVSHEDPEVKFNWYVDGVEVHNAKTKPREEQYNSTYRVVSVLTVLHQDWLNGKEYKCKVSNKALGAPIEKTISKAKGQPREPQVYTLPPIRELMTSNQVSLSCAVKGFYPSDIAVEWESNGQPENNYKTTPPVLDSDGSFFLVSKLTVDKSRWQQGNVFSCSVMHEALHNHYTQKSLSLSPGK

SEQ ID NO: 1176 - protein, 5 aa, synthetic construct
  REGION 1..5: note = Ab0612 CDR H1
SYSIH

SEQ ID NO: 1177 - protein, 17 aa, synthetic construct
  REGION 1..17: note = Ab0612 CDR H2
SISPYYGSTYYADSVKG

SEQ ID NO: 1178 - protein, 18 aa, synthetic construct
  REGION 1..18: note = Ab0612 CDR H3
YYEWYKYSLYLGSLGFDY

SEQ ID NO: 1179 - protein, 457 aa, synthetic construct
  REGION 1..457: note = Ab0613 HC Hole Fab-Fc
EVQLVESGGGLVQPGGSLRLSCAASGFNVSSYSIHWVRQAPGKGLEWVASISPYYGSTYYADSVKGRFTISADTSKNTAYLQMNSLRAEDTAVYYCARSYEWYKYSLYMGSMGFDYWGQGTLVTVSSASTKGPSVFPLAPSSKSTSGGTAALGCLVKDYFPEPVTVSWNSGALTSGVHTFPAVLQSSGLYSLSSVVTVPSSSLGTQTYICNVNHKPSNTKVDKKVEPKSCDKTHTCPPCPAPEAAGGPSVFLFPPKPKDTLMISRTPEVTCVVVDVSHEDPEVKFNWYVDGVEVHNAKTKPREEQYNSTYRVVSVLTVLHQDWLNGKEYKCKVSNKALGAPIEKTISKAKGQPREPQVYTLPPIRELMTSNQVSLSCAVKGFYPSDIAVEWESNGQPENNYKTTPPVLDSDGSFFLVSKLTVDKSRWQQGNVFSCSVMHEALHNHYTQKSLSLSPGK

SEQ ID NO: 1180 - protein, 5 aa, synthetic construct
  REGION 1..5: note = Ab0613 CDR H1
SYSIH

SEQ ID NO: 1181 - protein, 17 aa, synthetic construct
  REGION 1..17: note = Ab0613 CDR H2
SISPYYGSTYYADSVKG

SEQ ID NO: 1182 - protein, 18 aa, synthetic construct
  REGION 1..18: note = Ab0613 CDR H3
SYEWYKYSLYMGSMGFDY

SEQ ID NO: 1183 - protein, 457 aa, synthetic construct
  REGION 1..457: note = Ab0614 HC Hole Fab-Fc
EVQLVESGGGLVQPGGSLRLSCAASGFNVSSYSIHWVRQAPGKGLEWVASISPYYGSTYYADSVKGRFTISADTSKNTAYLQMNSLRAEDTAVYYCARYYEWYKSSLYMGSMGFDYWGQGTLVTVSSASTKGPSVFPLAPSSKSTSGGTAALGCLVKDYFPEPVTVSWNSGALTSGVHTFPAVLQSSGLYSLSSVVTVPSSSLGTQTYICNVNHKPSNTKVDKKVEPKSCDKTHTCPPCPAPEAAGGPSVFLFPPKPKDTLMISRTPEVTCVVVDVSHEDPEVKFNWYVDGVEVHNAKTKPREEQYNSTYRVVSVLTVLHQDWLNGKEYKCKVSNKALGAPIEKTISKAKGQPREPQVYTLPPIRELMTSNQVSLSCAVKGFYPSDIAVEWESNGQPENNYKTTPPVLDSDGSFFLVSKLTVDKSRWQQGNVFSCSVMHEALHNHYTQKSLSLSPGK

SEQ ID NO: 1184 - protein, 5 aa, synthetic construct
  REGION 1..5: note = Ab0614 CDR H1
SYSIH

SEQ ID NO: 1185 - protein, 17 aa, synthetic construct
  REGION 1..17: note = Ab0614 CDR H2
SISPYYGSTYYADSVKG

SEQ ID NO: 1186 - protein, 18 aa, synthetic construct
  REGION 1..18: note = Ab0614 CDR H3
YYEWYKSSLYMGSMGFDY

SEQ ID NO: 1187 - protein, 214 aa, synthetic construct; identical to SEQ ID NO: 857
  REGION 1..214: note = LC sequence

SEQ ID NO: 1188 - protein, 11 aa, synthetic construct
  REGION 1..11: note = CDR L1
RASQSVSSAVA

SEQ ID NO: 1189 - protein, 7 aa, synthetic construct
  REGION 1..7: note = CDR L2
SASSLYS

SEQ ID NO: 1190 - protein, 9 aa, synthetic construct
  REGION 1..9: note = CDR L3
QQGGYSLIT

SEQ ID NO: 1191 - protein, 238 aa, synthetic construct; identical to SEQ ID NO: 52
  REGION 1..238: note = Knob Fc-6xHis

SEQ ID NO: 1192 - protein, 457 aa, synthetic construct
  REGION 1..457: note = Ab0635 HC
EVQLVESGGGLVQPGGSLRLSCAASGFDVSSYSIHWVRQAPGKGLEWVASISPYYGSTYYADSVKGRFTISADTSKNTAYLQMNSLRAEDTAVYYCARYYEWYKYSLYMGSLGFDYWGQGTLVTVSSASTKGPSVFPLAPSSKSTSGGTAALGCLVKDYFPEPVTVSWNSGALTSGVHTFPAVLQSSGLYSLSSVVTVPSSSLGTQTYICNVNHKPSNTKVDKKVEPKSCDKTHTCPPCPAPEAAGGPSVFLFPPKPKDTLMISRTPEVTCVVVDVSHEDPEVKFNWYVDGVEVHNAKTKPREEQYNSTYRVVSVLTVLHQDWLNGKEYKCKVSNKALGAPIEKTISKAKGQPREPQVYTLPPSRDELTKNQVSLTCLVKGFYPSDIAVEWESNGQPENNYKTTPPVLDSDGSFFLYSKLTVDKSRWQQGNVFSCSVMHEALHNHYTQKSLSLSPGK

SEQ ID NO: 1193 - protein, 5 aa, synthetic construct
  REGION 1..5: note = Ab0635 CDR H1
SYSIH

SEQ ID NO: 1194 - protein, 17 aa, synthetic construct
  REGION 1..17: note = Ab0635 CDR H2
SISPYYGSTYYADSVKG

SEQ ID NO: 1195 - protein, 18 aa, synthetic construct
  REGION 1..18: note = Ab0635 CDR H3
YYEWYKYSLYMGSLGFDY

SEQ ID NO: 1196 - protein, 457 aa, synthetic construct
  REGION 1..457: note = Ab0636 HC
EVQLVESGGGLVQPGGSLRLSCAASGFDFSSYSIHWVRQAPGKGLEWVASISPYYGSTYYADSVKGRFTISADTSKNTAYLQMNSLRAEDTAVYYCARYYEWYKYSLYMGSLGFDYWGQGTLVTVSSASTKGPSVFPLAPSSKSTSGGTAALGCLVKDYFPEPVTVSWNSGALTSGVHTFPAVLQSSGLYSLSSVVTVPSSSLGTQTYICNVNHKPSNTKVDKKVEPKSCDKTHTCPPCPAPEAAGGPSVFLFPPKPKDTLMISRTPEVTCVVVDVSHEDPEVKFNWYVDGVEVHNAKTKPREEQYNSTYRVVSVLTVLHQDWLNGKEYKCKVSNKALGAPIEKTISKAKGQPREPQVYTLPPSRDELTKNQVSLTCLVKGFYPSDIAVEWESNGQPENNYKTTPPVLDSDGSFFLYSKLTVDKSRWQQGNVFSCSVMHEALHNHYTQKSLSLSPGK

SEQ ID NO: 1197 - protein, 5 aa, synthetic construct
  REGION 1..5: note = Ab0636 CDR H1
SYSIH

SEQ ID NO: 1198 - protein, 17 aa, synthetic construct
  REGION 1..17: note = Ab0636 CDR H2
SISPYYGSTYYADSVKG

SEQ ID NO: 1199 - protein, 18 aa, synthetic construct
  REGION 1..18: note = Ab0636 CDR H3
YYEWYKYSLYMGSLGFDY

SEQ ID NO: 1200 - protein, 457 aa, synthetic construct
  REGION 1..457: note = Ab0637 HC
EVQLVESGGGLVQPGGSLRLSCAASGFDFSSYSIHWVRQAPGKGLEWVASISPYYGSTYYADSVKGRFTISADTSKNTAYLQMNSLRAEDTAVYYCARYYEWYKYSLYLGSLGFDYWGQGTLVTVSSASTKGPSVFPLAPSSKSTSGGTAALGCLVKDYFPEPVTVSWNSGALTSGVHTFPAVLQSSGLYSLSSVVTVPSSSLGTQTYICNVNHKPSNTKVDKKVEPKSCDKTHTCPPCPAPEAAGGPSVFLFPPKPKDTLMISRTPEVTCVVVDVSHEDPEVKFNWYVDGVEVHNAKTKPREEQYNSTYRVVSVLTVLHQDWLNGKEYKCKVSNKALGAPIEKTISKAKGQPREPQVYTLPPSRDELTKNQVSLTCLVKGFYPSDIAVEWESNGQPENNYKTTPPVLDSDGSFFLYSKLTVDKSRWQQGNVFSCSVMHEALHNHYTQKSLSLSPGK

SEQ ID NO: 1201 - protein, 5 aa, synthetic construct
  REGION 1..5: note = Ab0637 CDR H1
SYSIH

SEQ ID NO: 1202 - protein, 17 aa, synthetic construct
  REGION 1..17: note = Ab0637 CDR H2
SISPYYGSTYYADSVKG

SEQ ID NO: 1203 - protein, 18 aa, synthetic construct
  REGION 1..18: note = Ab0637 CDR H3
YYEWYKYSLYLGSLGFDY

SEQ ID NO: 1204 - protein, 457 aa, synthetic construct
  REGION 1..457: note = Ab0638 HC
EVQLVESGGGLVQPGGSLRLSCAASGFDVSSYSIHWVRQAPGKGLEWVASISPYYGSTYYADSVKGRFTISADTSKNTAYLQMNSLRAEDTAVYYCARYYEWYKYSLYLGSLGFDYWGQGTLVTVSSASTKGPSVFPLAPSSKSTSGGTAALGCLVKDYFPEPVTVSWNSGALTSGVHTFPAVLQSSGLYSLSSVVTVPSSSLGTQTYICNVNHKPSNTKVDKKVEPKSCDKTHTCPPCPAPEAAGGPSVFLFPPKPKDTLMISRTPEVTCVVVDVSHEDPEVKFNWYVDGVEVHNAKTKPREEQYNSTYRVVSVLTVLHQDWLNGKEYKCKVSNKALGAPIEKTISKAKGQPREPQVYTLPPSRDELTKNQVSLTCLVKGFYPSDIAVEWESNGQPENNYKTTPPVLDSDGSFFLYSKLTVDKSRWQQGNVFSCSVMHEALHNHYTQKSLSLSPGK

SEQ ID NO: 1205 - protein, 5 aa, synthetic construct
  REGION 1..5: note = Ab0638 CDR H1
SYSIH

SEQ ID NO: 1206 - protein, 17 aa, synthetic construct
  REGION 1..17: note = Ab0638 CDR H2
SISPYYGSTYYADSVKG

SEQ ID NO: 1207 - protein, 18 aa, synthetic construct
  REGION 1..18: note = Ab0638 CDR H3
YYEWYKYSLYLGSLGFDY

SEQ ID NO: 1208 - protein, 457 aa, synthetic construct
  REGION 1..457: note = Ab0687 HC
EVQLVESGGGLVQPGGSLRLSCAASGFDFSSYSIHWVRQAPGKGLEWVASISPYYGSTYYADSVKGRFTISADTSKNTAYLQMNSLRAEDTAVYYCARYYEWYKYSLYAGSLGFDYWGQGTLVTVSSASTKGPSVFPLAPSSKSTSGGTAALGCLVKDYFPEPVTVSWNSGALTSGVHTFPAVLQSSGLYSLSSVVTVPSSSLGTQTYICNVNHKPSNTKVDKKVEPKSCDKTHTCPPCPAPEAAGGPSVFLFPPKPKDTLMISRTPEVTCVVVDVSHEDPEVKFNWYVDGVEVHNAKTKPREEQYNSTYRVVSVLTVLHQDWLNGKEYKCKVSNKALGAPIEKTISKAKGQPREPQVYTLPPSRDELTKNQVSLTCLVKGFYPSDIAVEWESNGQPENNYKTTPPVLDSDGSFFLYSKLTVDKSRWQQGNVFSCSVMHEALHNHYTQKSLSLSPGK

SEQ ID NO: 1209 - protein, 5 aa, synthetic construct
  REGION 1..5: note = Ab0687 CDR H1
SYSIH

SEQ ID NO: 1210 - protein, 17 aa, synthetic construct
  REGION 1..17: note = Ab0687 CDR H2
SISPYYGSTYYADSVKG

SEQ ID NO: 1211 - protein, 18 aa, synthetic construct
  REGION 1..18: note = Ab0687 CDR H3
YYEWYKYSLYAGSLGFDY

SEQ ID NO: 1212 - protein, 457 aa, synthetic construct
  REGION 1..457: note = Ab0688 HC
EVQLVESGGGLVQPGGSLRLSCAASGFDFSSYSIHWVRQAPGKGLEWVASISPNYGSTYYADSVKGRFTISADTSKNTAYLQMNSLRAEDTAVYYCARYYEWYKYSLYLGSLGFDYWGQGTLVTVSSASTKGPSVFPLAPSSKSTSGGTAALGCLVKDYFPEPVTVSWNSGALTSGVHTFPAVLQSSGLYSLSSVVTVPSSSLGTQTYICNVNHKPSNTKVDKKVEPKSCDKTHTCPPCPAPEAAGGPSVFLFPPKPKDTLMISRTPEVTCVVVDVSHEDPEVKFNWYVDGVEVHNAKTKPREEQYNSTYRVVSVLTVLHQDWLNGKEYKCKVSNKALGAPIEKTISKAKGQPREPQVYTLPPSRDELTKNQVSLTCLVKGFYPSDIAVEWESNGQPENNYKTTPPVLDSDGSFFLYSKLTVDKSRWQQGNVFSCSVMHEALHNHYTQKSLSLSPGK

SEQ ID NO: 1213 - protein, 5 aa, synthetic construct
  REGION 1..5: note = Ab0688 CDR H1
SYSIH

SEQ ID NO: 1214 - protein, 17 aa, synthetic construct
  REGION 1..17: note = Ab0688 CDR H2
SISPNYGSTYYADSVKG

SEQ ID NO: 1215 - protein, 18 aa, synthetic construct
  REGION 1..18: note = Ab0688 CDR H3
YYEWYKYSLYLGSLGFDY

SEQ ID NO: 1216 - protein, 457 aa, synthetic construct
  REGION 1..457: note = Ab0689 HC
EVQLVESGGGLVQPGGSLRLSCAASGFDFSSYSIHWVRQAPGKGLEWVASISPDYGSTYYADSVKGRFTISADTSKNTAYLQMNSLRAEDTAVYYCARYYEWYKYSLYLGSLGFDYWGQGTLVTVSSASTKGPSVFPLAPSSKSTSGGTAALGCLVKDYFPEPVTVSWNSGALTSGVHTFPAVLQSSGLYSLSSVVTVPSSSLGTQTYICNVNHKPSNTKVDKKVEPKSCDKTHTCPPCPAPEAAGGPSVFLFPPKPKDTLMISRTPEVTCVVVDVSHEDPEVKFNWYVDGVEVHNAKTKPREEQYNSTYRVVSVLTVLHQDWLNGKEYKCKVSNKALGAPIEKTISKAKGQPREPQVYTLPPSRDELTKNQVSLTCLVKGFYPSDIAVEWESNGQPENNYKTTPPVLDSDGSFFLYSKLTVDKSRWQQGNVFSCSVMHEALHNHYTQKSLSLSPGK

SEQ ID NO: 1217 - protein, 5 aa, synthetic construct
  REGION 1..5: note = Ab0689 CDR H1
SYSIH

SEQ ID NO: 1218 - protein, 17 aa, synthetic construct
  REGION 1..17: note = Ab0689 CDR H2
SISPDYGSTYYADSVKG

SEQ ID NO: 1219 - protein, 18 aa, synthetic construct
  REGION 1..18: note = Ab0689 CDR H3
YYEWYKYSLYLGSLGFDY

SEQ ID NO: 1220 - protein, 457 aa, synthetic construct
  REGION 1..457: note = Ab0690 HC
EVQLVESGGGLVQPGGSLRLSCAASGFDFSSYSIHWVRQAPGKGLEWVASISPHYGSTYYADSVKGRFTISADTSKNTAYLQMNSLRAEDTAVYYCARYYEWYKYSLYLGSLGFDYWGQGTLVTVSSASTKGPSVFPLAPSSKSTSGGTAALGCLVKDYFPEPVTVSWNSGALTSGVHTFPAVLQSSGLYSLSSVVTVPSSSLGTQTYICNVNHKPSNTKVDKKVEPKSCDKTHTCPPCPAPEAAGGPSVFLFPPKPKDTLMISRTPEVTCVVVDVSHEDPEVKFNWYVDGVEVHNAKTKPREEQYNSTYRVVSVLTVLHQDWLNGKEYKCKVSNKALGAPIEKTISKAKGQPREPQVYTLPPSRDELTKNQVSLTCLVKGFYPSDIAVEWESNGQPENNYKTTPPVLDSDGSFFLYSKLTVDKSRWQQGNVFSCSVMHEALHNHYTQKSLSLSPGK

SEQ ID NO: 1221 - protein, 5 aa, synthetic construct
  REGION 1..5: note = Ab0690 CDR H1
SYSIH

SEQ ID NO: 1222 - protein, 17 aa, synthetic construct
  REGION 1..17: note = Ab0690 CDR H2
SISPHYGSTYYADSVKG

SEQ ID NO: 1223 - protein, 18 aa, synthetic construct
  REGION 1..18: note = Ab0690 CDR H3
YYEWYKYSLYLGSLGFDY

SEQ ID NO: 1224 - protein, 457 aa, synthetic construct
  REGION 1..457: note = Ab0691 HC
EVQLVESGGGLVQPGGSLRLSCAASGFDFSSYSIHWVRQAPGKGLEWVASISPKYGSTYYADSVKGRFTISADTSKNTAYLQMNSLRAEDTAVYYCARYYEWYKYSLYLGSLGFDYWGQGTLVTVSSASTKGPSVFPLAPSSKSTSGGTAALGCLVKDYFPEPVTVSWNSGALTSGVHTFPAVLQSSGLYSLSSVVTVPSSSLGTQTYICNVNHKPSNTKVDKKVEPKSCDKTHTCPPCPAPEAAGGPSVFLFPPKPKDTLMISRTPEVTCVVVDVSHEDPEVKFNWYVDGVEVHNAKTKPREEQYNSTYRVVSVLTVLHQDWLNGKEYKCKVSNKALGAPIEKTISKAKGQPREPQVYTLPPSRDELTKNQVSLTCLVKGFYPSDIAVEWESNGQPENNYKTTPPVLDSDGSFFLYSKLTVDKSRWQQGNVFSCSVMHEALHNHYTQKSLSLSPGK

SEQ ID NO: 1225 - protein, 5 aa, synthetic construct
  REGION 1..5: note = Ab0691 CDR H1
SYSIH

SEQ ID NO: 1226 - protein, 17 aa, synthetic construct
  REGION 1..17: note = Ab0691 CDR H2
SISPKYGSTYYADSVKG

SEQ ID NO: 1227 - protein, 18 aa, synthetic construct
  REGION 1..18: note = Ab0691 CDR H3
YYEWYKYSLYLGSLGFDY

SEQ ID NO: 1228 - protein, 457 aa, synthetic construct
  REGION 1..457: note = Ab0692 HC
EVQLVESGGGLVQPGGSLRLSCAASGFDFSSYSIHWVRQAPGKGLEWVASISPSYGSTYYADSVKGRFTISADTSKNTAYLQMNSLRAEDTAVYYCARYYEWYKYSLYLGSLGFDYWGQGTLVTVSSASTKGPSVFPLAPSSKSTSGGTAALGCLVKDYFPEPVTVSWNSGALTSGVHTFPAVLQSSGLYSLSSVVTVPSSSLGTQTYICNVNHKPSNTKVDKKVEPKSCDKTHTCPPCPAPEAAGGPSVFLFPPKPKDTLMISRTPEVTCVVVDVSHEDPEVKFNWYVDGVEVHNAKTKPREEQYNSTYRVVSVLTVLHQDWLNGKEYKCKVSNKALGAPIEKTISKAKGQPREPQVYTLPPSRDELTKNQVSLTCLVKGFYPSDIAVEWESNGQPENNYKTTPPVLDSDGSFFLYSKLTVDKSRWQQGNVFSCSVMHEALHNHYTQKSLSLSPGK

SEQ ID NO: 1229 - protein, 5 aa, synthetic construct
  REGION 1..5: note = Ab0692 CDR H1
SYSIH

SEQ ID NO: 1230 - protein, 17 aa, synthetic construct
  REGION 1..17: note = Ab0692 CDR H2
SISPSYGSTYYADSVKG

SEQ ID NO: 1231 - protein, 18 aa, synthetic construct
  REGION 1..18: note = Ab0692 CDR H3
YYEWYKYSLYLGSLGFDY

SEQ ID NO: 1232 - protein, 457 aa, synthetic construct
  REGION 1..457: note = Ab0693 HC
EVQLVESGGGLVQPGGSLRLSCAASGFDFSSYSIHWVRQAPGKGLEWVASISPYEGSTYYADSVKGRFTISADTSKNTAYLQMNSLRAEDTAVYYCARYYEWYKYSLYLGSLGFDYWGQGTLVTVSSASTKGPSVFPLAPSSKSTSGGTAALGCLVKDYFPEPVTVSWNSGALTSGVHTFPAVLQSSGLYSLSSVVTVPSSSLGTQTYICNVNHKPSNTKVDKKVEPKSCDKTHTCPPCPAPEAAGGPSVFLFPPKPKDTLMISRTPEVTCVVVDVSHEDPEVKFNWYVDGVEVHNAKTKPREEQYNSTYRVVSVLTVLHQDWLNGKEYKCKVSNKALGAPIEKTISKAKGQPREPQVYTLPPSRDELTKNQVSLTCLVKGFYPSDIAVEWESNGQPENNYKTTPPVLDSDGSFFLYSKLTVDKSRWQQGNVFSCSVMHEALHNHYTQKSLSLSPGK

SEQ ID NO: 1233 - protein, 5 aa, synthetic construct
  REGION 1..5: note = Ab0693 CDR H1
SYSIH

SEQ ID NO: 1234 - protein, 17 aa, synthetic construct
  REGION 1..17: note = Ab0693 CDR H2
SISPYEGSTYYADSVKG

SEQ ID NO: 1235 - protein, 18 aa, synthetic construct
  REGION 1..18: note = Ab0693 CDR H3
YYEWYKYSLYLGSLGFDY

SEQ ID NO: 1236 - protein, 457 aa, synthetic construct
  REGION 1..457: note = Ab0694 HC
EVQLVESGGGLVQPGGSLRLSCAASGFDFSSYSIHWVRQAPGKGLEWVASISPYQGSTYYADSVKGRFTISADTSKNTAYLQMNSLRAEDTAVYYCARYYEWYKYSLYLGSLGFDYWGQGTLVTVSSASTKGPSVFPLAPSSKSTSGGTAALGCLVKDYFPEPVTVSWNSGALTSGVHTFPAVLQSSGLYSLSSVVTVPSSSLGTQTYICNVNHKPSNTKVDKKVEPKSCDKTHTCPPCPAPEAAGGPSVFLFPPKPKDTLMISRTPEVTCVVVDVSHEDPEVKFNWYVDGVEVHNAKTKPREEQYNSTYRVVSVLTVLHQDWLNGKEYKCKVSNKALGAPIEKTISKAKGQPREPQVYTLPPSRDELTKNQVSLTCLVKGFYPSDIAVEWESNGQPENNYKTTPPVLDSDGSFFLYSKLTVDKSRWQQGNVFSCSVMHEALHNHYTQKSLSLSPGK

SEQ ID NO: 1237 - protein, 5 aa, synthetic construct
  REGION 1..5: note = Ab0694 CDR H1
SYSIH

SEQ ID NO: 1238 - protein, 17 aa, synthetic construct
  REGION 1..17: note = Ab0694 CDR H2
SISPYQGSTYYADSVKG

SEQ ID NO: 1239 - protein, 18 aa, synthetic construct
  REGION 1..18: note = Ab0694 CDR H3
YYEWYKYSLYLGSLGFDY

SEQ ID NO: 1240 - protein, 457 aa, synthetic construct
  REGION 1..457: note = Ab0695 HC
EVQLVESGGGLVQPGGSLRLSCAASGFDFSSYSIHWVRQAPGKGLEWVASISPYHGSTYYADSVKGRFTISADTSKNTAYLQMNSLRAEDTAVYYCARYYEWYKYSLYLGSLGFDYWGQGTLVTVSSASTKGPSVFPLAPSSKSTSGGTAALGCLVKDYFPEPVTVSWNSGALTSGVHTFPAVLQSSGLYSLSSVVTVPSSSLGTQTYICNVNHKPSNTKVDKKVEPKSCDKTHTCPPCPAPEAAGGPSVFLFPPKPKDTLMISRTPEVTCVVVDVSHEDPEVKFNWYVDGVEVHNAKTKPREEQYNSTYRVVSVLTVLHQDWLNGKEYKCKVSNKALGAPIEKTISKAKGQPREPQVYTLPPSRDELTKNQVSLTCLVKGFYPSDIAVEWESNGQPENNYKTTPPVLDSDGSFFLYSKLTVDKSRWQQGNVFSCSVMHEALHNHYTQKSLSLSPGK

SEQ ID NO: 1241 - protein, 5 aa, synthetic construct
  REGION 1..5: note = Ab0695 CDR H1
SYSIH

SEQ ID NO: 1242 - protein, 17 aa, synthetic construct
  REGION 1..17: note = Ab0695 CDR H2
SISPYHGSTYYADSVKG

SEQ ID NO: 1243 - protein, 18 aa, synthetic construct
  REGION 1..18: note = Ab0695 CDR H3
YYEWYKYSLYLGSLGFDY

SEQ ID NO: 1244 - protein, 457 aa, synthetic construct
  REGION 1..457: note = Ab0696 HC
EVQLVESGGGLVQPGGSLRLSCAASGFDFSSYSIHWVRQAPGKGLEWVASISPYKGSTYYADSVKGRFTISADTSKNTAYLQMNSLRAEDTAVYYCARYYEWYKYSLYLGSLGFDYWGQGTLVTVSSASTKGPSVFPLAPSSKSTSGGTAALGCLVKDYFPEPVTVSWNSGALTSGVHTFPAVLQSSGLYSLSSVVTVPSSSLGTQTYICNVNHKPSNTKVDKKVEPKSCDKTHTCPPCPAPEAAGGPSVFLFPPKPKDTLMISRTPEVTCVVVDVSHEDPEVKFNWYVDGVEVHNAKTKPREEQYNSTYRVVSVLTVLHQDWLNGKEYKCKVSNKALGAPIEKTISKAKGQPREPQVYTLPPSRDELTKNQVSLTCLVKGFYPSDIAVEWESNGQPENNYKTTPPVLDSDGSFFLYSKLTVDKSRWQQGNVFSCSVMHEALHNHYTQKSLSLSPGK

SEQ ID NO: 1245 - protein, 5 aa, synthetic construct
  REGION 1..5: note = Ab0696 CDR H1
SYSIH

SEQ ID NO: 1246 - protein, 17 aa, synthetic construct
  REGION 1..17: note = Ab0696 CDR H2
SISPYKGSTYYADSVKG

SEQ ID NO: 1247 - protein, 18 aa, synthetic construct
  REGION 1..18: note = Ab0696 CDR H3
YYEWYKYSLYLGSLGFDY

SEQ ID NO: 1248 - protein, 457 aa, synthetic construct
  REGION 1..457: note = Ab0697 HC
EVQLVESGGGLVQPGGSLRLSCAASGFDFSSYSIHWVRQAPGKGLEWVASISPYSGSTYYADSVKGRFTISADTSKNTAYLQMNSLRAEDTAVYYCARYYEWYKYSLYLGSLGFDYWGQGTLVTVSSASTKGPSVFPLAPSSKSTSGGTAALGCLVKDYFPEPVTVSWNSGALTSGVHTFPAVLQSSGLYSLSSVVTVPSSSLGTQTYICNVNHKPSNTKVDKKVEPKSCDKTHTCPPCPAPEAAGGPSVFLFPPKPKDTLMISRTPEVTCVVVDVSHEDPEVKFNWYVDGVEVHNAKTKPREEQYNSTYRVVSVLTVLHQDWLNGKEYKCKVSNKALGAPIEKTISKAKGQPREPQVYTLPPSRDELTKNQVSLTCLVKGFYPSDIAVEWESNGQPENNYKTTPPVLDSDGSFFLYSKLTVDKSRWQQGNVFSCSVMHEALHNHYTQKSLSLSPGK

SEQ ID NO: 1249 - protein, 5 aa, synthetic construct
  REGION 1..5: note = Ab0697 CDR H1
SYSIH

SEQ ID NO: 1250 - protein, 17 aa, synthetic construct
  REGION 1..17: note = Ab0697 CDR H2
SISPYSGSTYYADSVKG

SEQ ID NO: 1251 - protein, 18 aa, synthetic construct
  REGION 1..18: note = Ab0697 CDR H3
YYEWYKYSLYLGSLGFDY

SEQ ID NO: 1252 - protein, 457 aa, synthetic construct
  REGION 1..457: note = Ab0698 HC
EVQLVESGGGLVQPGGSLRLSCAASGFDFSSYSIHWVRQAPGKGLEWVASISPYYGSTYYADSVKGRFTISADTSKNTAYLQMNSLRAEDTAVYYCARYYEWYKYDLYLGSLGFDYWGQGTLVTVSSASTKGPSVFPLAPSSKSTSGGTAALGCLVKDYFPEPVTVSWNSGALTSGVHTFPAVLQSSGLYSLSSVVTVPSSSLGTQTYICNVNHKPSNTKVDKKVEPKSCDKTHTCPPCPAPEAAGGPSVFLFPPKPKDTLMISRTPEVTCVVVDVSHEDPEVKFNWYVDGVEVHNAKTKPREEQYNSTYRVVSVLTVLHQDWLNGKEYKCKVSNKALGAPIEKTISKAKGQPREPQVYTLPPSRDELTKNQVSLTCLVKGFYPSDIAVEWESNGQPENNYKTTPPVLDSDGSFFLYSKLTVDKSRWQQGNVFSCSVMHEALHNHYTQKSLSLSPGK

SEQ ID NO: 1253 - protein, 5 aa, synthetic construct
  REGION 1..5: note = Ab0698 CDR H1
SYSIH

SEQ ID NO: 1254 - protein, 17 aa, synthetic construct
  REGION 1..17: note = Ab0698 CDR H2
SISPYYGSTYYADSVKG

SEQ ID NO: 1255 - protein, 18 aa, synthetic construct
  REGION 1..18: note = Ab0698 CDR H3
YYEWYKYDLYLGSLGFDY

SEQ ID NO: 1256 - protein, 457 aa, synthetic construct
  REGION 1..457: note = Ab0699 HC
EVQLVESGGGLVQPGGSLRLSCAASGFDFSSYSIHWVRQAPGKGLEWVASISPYYGSTYYADSVKGRFTISADTSKNTAYLQMNSLRAEDTAVYYCARYYEWYKYKLYLGSLGFDYWGQGTLVTVSSASTKGPSVFPLAPSSKSTSGGTAALGCLVKDYFPEPVTVSWNSGALTSGVHTFPAVLQSSGLYSLSSVVTVPSSSLGTQTYICNVNHKPSNTKVDKKVEPKSCDKTHTCPPCPAPEAAGGPSVFLFPPKPKDTLMISRTPEVTCVVVDVSHEDPEVKFNWYVDGVEVHNAKTKPREEQYNSTYRVVSVLTVLHQDWLNGKEYKCKVSNKALGAPIEKTISKAKGQPREPQVYTLPPSRDELTKNQVSLTCLVKGFYPSDIAVEWESNGQPENNYKTTPPVLDSDGSFFLYSKLTVDKSRWQQGNVFSCSVMHEALHNHYTQKSLSLSPGK

SEQ ID NO: 1257 - protein, 5 aa, synthetic construct
  REGION 1..5: note = Ab0699 CDR H1
SYSIH

SEQ ID NO: 1258 - protein, 17 aa, synthetic construct
  REGION 1..17: note = Ab0699 CDR H2
SISPYYGSTYYADSVKG

SEQ ID NO: 1259 - protein, 18 aa, synthetic construct
  REGION 1..18: note = Ab0699 CDR H3
YYEWYKYKLYLGSLGFDY

SEQ ID NO: 1260 - protein, 457 aa, synthetic construct
  REGION 1..457: note = Ab0700 HC
EVQLVESGGGLVQPGGSLRLSCAASGFDFSSYSIHWVRQAPGKGLEWVASISPYYGSTYYADSVKGRFTISADTSKNTAYLQMNSLRAEDTAVYYCARYYEWYKYSAYLGSLGFDYWGQGTLVTVSSASTKGPSVFPLAPSSKSTSGGTAALGCLVKDYFPEPVTVSWNSGALTSGVHTFPAVLQSSGLYSLSSVVTVPSSSLGTQTYICNVNHKPSNTKVDKKVEPKSCDKTHTCPPCPAPEAAGGPSVFLFPPKPKDTLMISRTPEVTCVVVDVSHEDPEVKFNWYVDGVEVHNAKTKPREEQYNSTYRVVSVLTVLHQDWLNGKEYKCKVSNKALGAPIEKTISKAKGQPREPQVYTLPPSRDELTKNQVSLTCLVKGFYPSDIAVEWESNGQPENNYKTTPPVLDSDGSFFLYSKLTVDKSRWQQGNVFSCSVMHEALHNHYTQKSLSLSPGK

SEQ ID NO: 1261 - protein, 5 aa, synthetic construct
  REGION 1..5: note = Ab0700 CDR H1
SYSIH

SEQ ID NO: 1262 - protein, 17 aa, synthetic construct
  REGION 1..17: note = Ab0700 CDR H2
SISPYYGSTYYADSVKG

SEQ ID NO: 1263 - protein, 18 aa, synthetic construct
  REGION 1..18: note = Ab0700 CDR H3
YYEWYKYSAYLGSLGFDY

SEQ ID NO: 1264 - protein, 457 aa, synthetic construct
  REGION 1..457: note = Ab0701 HC
EVQLVESGGGLVQPGGSLRLSCAASGFDFSSYSIHWVRQAPGKGLEWVASISPYYGSTYYADSVKGRFTISADTSKNTAYLQMNSLRAEDTAVYYCARYYEWYKYSNYLGSLGFDYWGQGTLVTVSSASTKGPSVFPLAPSSKSTSGGTAALGCLVKDYFPEPVTVSWNSGALTSGVHTFPAVLQSSGLYSLSSVVTVPSSSLGTQTYICNVNHKPSNTKVDKKVEPKSCDKTHTCPPCPAPEAAGGPSVFLFPPKPKDTLMISRTPEVTCVVVDVSHEDPEVKFNWYVDGVEVHNAKTKPREEQYNSTYRVVSVLTVLHQDWLNGKEYKCKVSNKALGAPIEKTISKAKGQPREPQVYTLPPSRDELTKNQVSLTCLVKGFYPSDIAVEWESNGQPENNYKTTPPVLDSDGSFFLYSKLTVDKSRWQQGNVFSCSVMHEALHNHYTQKSLSLSPGK

SEQ ID NO: 1265 - protein, 5 aa, synthetic construct
  REGION 1..5: note = Ab0701 CDR H1
SYSIH

SEQ ID NO: 1266 - protein, 17 aa, synthetic construct
  REGION 1..17: note = Ab0701 CDR H2
SISPYYGSTYYADSVKG

SEQ ID NO: 1267 - protein, 18 aa, synthetic construct
  REGION 1..18: note = Ab0701 CDR H3
YYEWYKYSNYLGSLGFDY

SEQ ID NO: 1268 - protein, 457 aa, synthetic construct
  REGION 1..457: note = Ab0702 HC
EVQLVESGGGLVQPGGSLRLSCAASGFDFSSYSIHWVRQAPGKGLEWVASISPYYGSTYYADSVKGRFTISADTSKNTAYLQMNSLRAEDTAVYYCARYYEWYKYSDYLGSLGFDYWGQGTLVTVSSASTKGPSVFPLAPSSKSTSGGTAALGCLVKDYFPEPVTVSWNSGALTSGVHTFPAVLQSSGLYSLSSVVTVPSSSLGTQTYICNVNHKPSNTKVDKKVEPKSCDKTHTCPPCPAPEAAGGPSVFLFPPKPKDTLMISRTPEVTCVVVDVSHEDPEVKFNWYVDGVEVHNAKTKPREEQYNSTYRVVSVLTVLHQDWLNGKEYKCKVSNKALGAPIEKTISKAKGQPREPQVYTLPPSRDELTKNQVSLTCLVKGFYPSDIAVEWESNGQPENNYKTTPPVLDSDGSFFLYSKLTVDKSRWQQGNVFSCSVMHEALHNHYTQKSLSLSPGK

SEQ ID NO: 1269 - protein, 5 aa, synthetic construct
  REGION 1..5: note = Ab0702 CDR H1
SYSIH

SEQ ID NO: 1270 - protein, 17 aa, synthetic construct
  REGION 1..17: note = Ab0702 CDR H2
SISPYYGSTYYADSVKG

SEQ ID NO: 1271 - protein, 18 aa, synthetic construct
  REGION 1..18: note = Ab0702 CDR H3
YYEWYKYSDYLGSLGFDY

SEQ ID NO: 1272 - protein, 457 aa, synthetic construct
  REGION 1..457: note = Ab0703 HC
EVQLVESGGGLVQPGGSLRLSCAASGFDFSSYSIHWVRQAPGKGLEWVASISPYYGSTYYADSVKGRFTISADTSKNTAYLQMNSLRAEDTAVYYCARYYEWYKYSHYLGSLGFDYWGQGTLVTVSSASTKGPSVFPLAPSSKSTSGGTAALGCLVKDYFPEPVTVSWNSGALTSGVHTFPAVLQSSGLYSLSSVVTVPSSSLGTQTYICNVNHKPSNTKVDKKVEPKSCDKTHTCPPCPAPEAAGGPSVFLFPPKPKDTLMISRTPEVTCVVVDVSHEDPEVKFNWYVDGVEVHNAKTKPREEQYNSTYRVVSVLTVLHQDWLNGKEYKCKVSNKALGAPIEKTISKAKGQPREPQVYTLPPSRDELTKNQVSLTCLVKGFYPSDIAVEWESNGQPENNYKTTPPVLDSDGSFFLYSKLTVDKSRWQQGNVFSCSVMHEALHNHYTQKSLSLSPGK

SEQ ID NO: 1273 - protein, 5 aa, synthetic construct
  REGION 1..5: note = Ab0703 CDR H1
SYSIH

SEQ ID NO: 1274 - protein, 17 aa, synthetic construct
  REGION 1..17: note = Ab0703 CDR H2
SISPYYGSTYYADSVKG

SEQ ID NO: 1275 - protein, 18 aa, synthetic construct
  REGION 1..18: note = Ab0703 CDR H3
YYEWYKYSHYLGSLGFDY

SEQ ID NO: 1276 - protein, 457 aa, synthetic construct
  REGION 1..457: note = Ab0704 HC
EVQLVESGGGLVQPGGSLRLSCAASGFDFSSYSIHWVRQAPGKGLEWVASISPYYGSTYYADSVKGRFTISADTSKNTAYLQMNSLRAEDTAVYYCARYYEWYKYSKYLGSLGFDYWGQGTLVTVSSASTKGPSVFPLAPSSKSTSGGTAALGCLVKDYFPEPVTVSWNSGALTSGVHTFPAVLQSSGLYSLSSVVTVPSSSLGTQTYICNVNHKPSNTKVDKKVEPKSCDKTHTCPPCPAPEAAGGPSVFLFPPKPKDTLMISRTPEVTCVVVDVSHEDPEVKFNWYVDGVEVHNAKTKPREEQYNSTYRVVSVLTVLHQDWLNGKEYKCKVSNKALGAPIEKTISKAKGQPREPQVYTLPPSRDELTKNQVSLTCLVKGFYPSDIAVEWESNGQPENNYKTTPPVLDSDGSFFLYSKLTVDKSRWQQGNVFSCSVMHEALHNHYTQKSLSLSPGK

SEQ ID NO: 1277 - protein, 5 aa, synthetic construct
  REGION 1..5: note = Ab0704 CDR H1
SYSIH

SEQ ID NO: 1278 - protein, 17 aa, synthetic construct
  REGION 1..17: note = Ab0704 CDR H2
SISPYYGSTYYADSVKG

SEQ ID NO: 1279 - protein, 18 aa, synthetic construct
  REGION 1..18: note = Ab0704 CDR H3
YYEWYKYSKYLGSLGFDY

SEQ ID NO: 1280 - protein, 457 aa, synthetic construct
  REGION 1..457: note = Ab0705 HC
EVQLVESGGGLVQPGGSLRLSCAASGFDFSSYSIHWVRQAPGKGLEWVASISPYYGSTYYADSVKGRFTISADTSKNTAYLQMNSLRAEDTAVYYCARYYEWYKYSSYLGSLGFDYWGQGTLVTVSSASTKGPSVFPLAPSSKSTSGGTAALGCLVKDYFPEPVTVSWNSGALTSGVHTFPAVLQSSGLYSLSSVVTVPSSSLGTQTYICNVNHKPSNTKVDKKVEPKSCDKTHTCPPCPAPEAAGGPSVFLFPPKPKDTLMISRTPEVTCVVVDVSHEDPEVKFNWYVDGVEVHNAKTKPREEQYNSTYRVVSVLTVLHQDWLNGKEYKCKVSNKALGAPIEKTISKAKGQPREPQVYTLPPSRDELTKNQVSLTCLVKGFYPSDIAVEWESNGQPENNYKTTPPVLDSDGSFFLYSKLTVDKSRWQQGNVFSCSVMHEALHNHYTQKSLSLSPGK

SEQ ID NO: 1281 - protein, 5 aa, synthetic construct
  REGION 1..5: note = Ab0705 CDR H1
SYSIH

SEQ ID NO: 1282 - protein, 17 aa, synthetic construct
  REGION 1..17: note = Ab0705 CDR H2
SISPYYGSTYYADSVKG

SEQ ID NO: 1283 - protein, 18 aa, synthetic construct
  REGION 1..18: note = Ab0705 CDR H3
YYEWYKYSSYLGSLGFDY

SEQ ID NO: 1284 - protein, 457 aa, synthetic construct
  REGION 1..457: note = Ab0706 HC
EVQLVESGGGLVQPGGSLRLSCAASGFDFSSYSIHWVRQAPGKGLEWVASISPYYGSTYYADSVKGRFTISADTSKNTAYLQMNSLRAEDTAVYYCARYYEWYKYSLNLGSLGFDYWGQGTLVTVSSASTKGPSVFPLAPSSKSTSGGTAALGCLVKDYFPEPVTVSWNSGALTSGVHTFPAVLQSSGLYSLSSVVTVPSSSLGTQTYICNVNHKPSNTKVDKKVEPKSCDKTHTCPPCPAPEAAGGPSVFLFPPKPKDTLMISRTPEVTCVVVDVSHEDPEVKFNWYVDGVEVHNAKTKPREEQYNSTYRVVSVLTVLHQDWLNGKEYKCKVSNKALGAPIEKTISKAKGQPREPQVYTLPPSRDELTKNQVSLTCLVKGFYPSDIAVEWESNGQPENNYKTTPPVLDSDGSFFLYSKLTVDKSRWQQGNVFSCSVMHEALHNHYTQKSLSLSPGK

SEQ ID NO: 1285 - protein, 5 aa, synthetic construct
  REGION 1..5: note = Ab0706 CDR H1
SYSIH

SEQ ID NO: 1286 - protein, 17 aa, synthetic construct
  REGION 1..17: note = Ab0706 CDR H2
SISPYYGSTYYADSVKG

SEQ ID NO: 1287 - protein, 18 aa, synthetic construct
  REGION 1..18: note = Ab0706 CDR H3
YYEWYKYSLNLGSLGFDY

SEQ ID NO: 1288 - protein, 457 aa, synthetic construct
  REGION 1..457: note = Ab0707 HC
EVQLVESGGGLVQPGGSLRLSCAASGFDFSSYSIHWVRQAPGKGLEWVASISPYYGSTYYADSVKGRFTISADTSKNTAYLQMNSLRAEDTAVYYCARYYEWYKYSLDLGSLGFDYWGQGTLVTVSSASTKGPSVFPLAPSSKSTSGGTAALGCLVKDYFPEPVTVSWNSGALTSGVHTFPAVLQSSGLYSLSSVVTVPSSSLGTQTYICNVNHKPSNTKVDKKVEPKSCDKTHTCPPCPAPEAAGGPSVFLFPPKPKDTLMISRTPEVTCVVVDVSHEDPEVKFNWYVDGVEVHNAKTKPREEQYNSTYRVVSVLTVLHQDWLNGKEYKCKVSNKALGAPIEKTISKAKGQPREPQVYTLPPSRDELTKNQVSLTCLVKGFYPSDIAVEWESNGQPENNYKTTPPVLDSDGSFFLYSKLTVDKSRWQQGNVFSCSVMHEALHNHYTQKSLSLSPGK

SEQ ID NO: 1289 - protein, 5 aa, synthetic construct
  REGION 1..5: note = Ab0707 CDR H1
SYSIH

SEQ ID NO: 1290 - protein, 17 aa, synthetic construct
  REGION 1..17: note = Ab0707 CDR H2
SISPYYGSTYYADSVKG

SEQ ID NO: 1291 - protein, 18 aa, synthetic construct
  REGION 1..18: note = Ab0707 CDR H3
YYEWYKYSLDLGSLGFDY

SEQ ID NO: 1292 - protein, 457 aa, synthetic construct
  REGION 1..457: note = Ab0708 HC
EVQLVESGGGLVQPGGSLRLSCAASGFDFSSYSIHWVRQAPGKGLEWVASISPYYGSTYYADSVKGRFTISADTSKNTAYLQMNSLRAEDTAVYYCARYYEWYKYSLHLGSLGFDYWGQGTLVTVSSASTKGPSVFPLAPSSKSTSGGTAALGCLVKDYFPEPVTVSWNSGALTSGVHTFPAVLQSSGLYSLSSVVTVPSSSLGTQTYICNVNHKPSNTKVDKKVEPKSCDKTHTCPPCPAPEAAGGPSVFLFPPKPKDTLMISRTPEVTCVVVDVSHEDPEVKFNWYVDGVEVHNAKTKPREEQYNSTYRVVSVLTVLHQDWLNGKEYKCKVSNKALGAPIEKTISKAKGQPREPQVYTLPPSRDELTKNQVSLTCLVKGFYPSDIAVEWESNGQPENNYKTTPPVLDSDGSFFLYSKLTVDKSRWQQGNVFSCSVMHEALHNHYTQKSLSLSPGK

SEQ ID NO: 1293 - protein, 5 aa, synthetic construct
  REGION 1..5: note = Ab0708 CDR H1
SYSIH

SEQ ID NO: 1294 - protein, 17 aa, synthetic construct
  REGION 1..17: note = Ab0708 CDR H2
SISPYYGSTYYADSVKG

SEQ ID NO: 1295 - protein, 18 aa, synthetic construct
  REGION 1..18: note = Ab0708 CDR H3
YYEWYKYSLHLGSLGFDY

SEQ ID NO: 1296 - protein, 457 aa, synthetic construct
  REGION 1..457: note = Ab0709 HC
EVQLVESGGGLVQPGGSLRLSCAASGFDFSSYSIHWVRQAPGKGLEWVASISPYYGSTYYADSVKGRFTISADTSKNTAYLQMNSLRAEDTAVYYCARYYEWYKYSLKLGSLGFDYWGQGTLVTVSSASTKGPSVFPLAPSSKSTSGGTAALGCLVKDYFPEPVTVSWNSGALTSGVHTFPAVLQSSGLYSLSSVVTVPSSSLGTQTYICNVNHKPSNTKVDKKVEPKSCDKTHTCPPCPAPEAAGGPSVFLFPPKPKDTLMISRTPEVTCVVVDVSHEDPEVKFNWYVDGVEVHNAKTKPREEQYNSTYRVVSVLTVLHQDWLNGKEYKCKVSNKALGAPIEKTISKAKGQPREPQVYTLPPSRDELTKNQVSLTCLVKGFYPSDIAVEWESNGQPENNYKTTPPVLDSDGSFFLYSKLTVDKSRWQQGNVFSCSVMHEALHNHYTQKSLSLSPGK

SEQ ID NO: 1297 - protein, 5 aa, synthetic construct
  REGION 1..5: note = Ab0709 CDR H1
SYSIH

SEQ ID NO: 1298 - protein, 17 aa, synthetic construct
  REGION 1..17: note = Ab0709 CDR H2
SISPYYGSTYYADSVKG

SEQ ID NO: 1299 - protein, 18 aa, synthetic construct
  REGION 1..18: note = Ab0709 CDR H3
YYEWYKYSLKLGSLGFDY

SEQ ID NO: 1300 - protein, 457 aa, synthetic construct
  REGION 1..457: note = Ab0710 HC
EVQLVESGGGLVQPGGSLRLSCAASGFDFSSYSIHWVRQAPGKGLEWVASISPYYGSTYYADSVKGRFTISADTSKNTAYLQMNSLRAEDTAVYYCARYYEWYKYSLSLGSLGFDYWGQGTLVTVSSASTKGPSVFPLAPSSKSTSGGTAALGCLVKDYFPEPVTVSWNSGALTSGVHTFPAVLQSSGLYSLSSVVTVPSSSLGTQTYICNVNHKPSNTKVDKKVEPKSCDKTHTCPPCPAPEAAGGPSVFLFPPKPKDTLMISRTPEVTCVVVDVSHEDPEVKFNWYVDGVEVHNAKTKPREEQYNSTYRVVSVLTVLHQDWLNGKEYKCKVSNKALGAPIEKTISKAKGQPREPQVYTLPPSRDELTKNQVSLTCLVKGFYPSDIAVEWESNGQPENNYKTTPPVLDSDGSFFLYSKLTVDKSRWQQGNVFSCSVMHEALHNHYTQKSLSLSPGK

SEQ ID NO: 1301 - protein, 5 aa, synthetic construct
  REGION 1..5: note = Ab0710 CDR H1
SYSIH

SEQ ID NO: 1302 - protein, 17 aa, synthetic construct
  REGION 1..17: note = Ab0710 CDR H2
SISPYYGSTYYADSVKG

SEQ ID NO: 1303 - protein, 18 aa, synthetic construct
  REGION 1..18: note = Ab0710 CDR H3
YYEWYKYSLSLGSLGFDY

SEQ ID NO: 1304 - protein, 214 aa, synthetic construct; identical to SEQ ID NO: 857
  REGION 1..214: note = LC sequence

SEQ ID NO: 1305 - protein, 11 aa, synthetic construct
  REGION 1..11: note = CDR L1
RASQSVSSAVA

SEQ ID NO: 1306 - protein, 7 aa, synthetic construct
  REGION 1..7: note = CDR L2
SASSLYS

SEQ ID NO: 1307 - protein, 9 aa, synthetic construct
  REGION 1..9: note = CDR L3
QQGGYSLIT

SEQ ID NO: 1308 - protein, 457 aa, synthetic construct
  REGION 1..457: note = Ab0901 HC
EVQLVESGGGLVQPGGSLRLSCAASGFDFSSYSIHWVRQAPGKGLEWVASISPHYGSTYYADSVKGRFTISADTSKNTAYLQMNSLRAEDTAVYYCARYYEWYKYDLYLGSLGFDYWGQGTLVTVSSASTKGPSVFPLAPSSKSTSGGTAALGCLVKDYFPEPVTVSWNSGALTSGVHTFPAVLQSSGLYSLSSVVTVPSSSLGTQTYICNVNHKPSNTKVDKKVEPKSCDKTHTCPPCPAPEAAGGPSVFLFPPKPKDTLMISRTPEVTCVVVDVSHEDPEVKFNWYVDGVEVHNAKTKPREEQYNSTYRVVSVLTVLHQDWLNGKEYKCKVSNKALGAPIEKTISKAKGQPREPQVYTLPPSRDELTKNQVSLTCLVKGFYPSDIAVEWESNGQPENNYKTTPPVLDSDGSFFLYSKLTVDKSRWQQGNVFSCSVMHEALHNHYTQKSLSLSPGK

SEQ ID NO: 1309 - protein, 5 aa, synthetic construct
  REGION 1..5: note = Ab0901 CDR H1
SYSIH

SEQ ID NO: 1310 - protein, 17 aa, synthetic construct
  REGION 1..17: note = Ab0901 CDR H2
SISPHYGSTYYADSVKG

SEQ ID NO: 1311 - protein, 18 aa, synthetic construct
  REGION 1..18: note = Ab0901 CDR H3
YYEWYKYDLYLGSLGFDY

SEQ ID NO: 1312 - protein, 457 aa, synthetic construct
  REGION 1..457: note = Ab0902 HC
EVQLVESGGGLVQPGGSLRLSCAASGFDFSSYSIHWVRQAPGKGLEWVASISPYYGSTYYADSVKGRFTISADTSKNTAYLQMNSLRAEDTAVYYCARYYEWYKYDLYAGSLGFDYWGQGTLVTVSSASTKGPSVFPLAPSSKSTSGGTAALGCLVKDYFPEPVTVSWNSGALTSGVHTFPAVLQSSGLYSLSSVVTVPSSSLGTQTYICNVNHKPSNTKVDKKVEPKSCDKTHTCPPCPAPEAAGGPSVFLFPPKPKDTLMISRTPEVTCVVVDVSHEDPEVKFNWYVDGVEVHNAKTKPREEQYNSTYRVVSVLTVLHQDWLNGKEYKCKVSNKALGAPIEKTISKAKGQPREPQVYTLPPSRDELTKNQVSLTCLVKGFYPSDIAVEWESNGQPENNYKTTPPVLDSDGSFFLYSKLTVDKSRWQQGNVFSCSVMHEALHNHYTQKSLSLSPGK

SEQ ID NO: 1313 - protein, 5 aa, synthetic construct
  REGION 1..5: note = Ab0902 CDR H1
SYSIH

SEQ ID NO: 1314 - protein, 17 aa, synthetic construct
  REGION 1..17: note = Ab0902 CDR H2
SISPYYGSTYYADSVKG

SEQ ID NO: 1315 - protein, 18 aa, synthetic construct
  REGION 1..18: note = Ab0902 CDR H3
YYEWYKYDLYAGSLGFDY

SEQ ID NO: 1316 - protein, 457 aa, synthetic construct
  REGION 1..457: note = Ab0903 HC
EVQLVESGGGLVQPGGSLRLSCAASGFDFSSYSIHWVRQAPGKGLEWVASISPHYGSTYYADSVKGRFTISADTSKNTAYLQMNSLRAEDTAVYYCARYYEWYKYDLYAGSLGFDYWGQGTLVTVSSASTKGPSVFPLAPSSKSTSGGTAALGCLVKDYFPEPVTVSWNSGALTSGVHTFPAVLQSSGLYSLSSVVTVPSSSLGTQTYICNVNHKPSNTKVDKKVEPKSCDKTHTCPPCPAPEAAGGPSVFLFPPKPKDTLMISRTPEVTCVVVDVSHEDPEVKFNWYVDGVEVHNAKTKPREEQYNSTYRVVSVLTVLHQDWLNGKEYKCKVSNKALGAPIEKTISKAKGQPREPQVYTLPPSRDELTKNQVSLTCLVKGFYPSDIAVEWESNGQPENNYKTTPPVLDSDGSFFLYSKLTVDKSRWQQGNVFSCSVMHEALHNHYTQKSLSLSPGK

SEQ ID NO: 1317 - protein, 5 aa, synthetic construct
  REGION 1..5: note = Ab0903 CDR H1
SYSIH

SEQ ID NO: 1318 - protein, 17 aa, synthetic construct
  REGION 1..17: note = Ab0903 CDR H2
SISPHYGSTYYADSVKG

SEQ ID NO: 1319 - protein, 18 aa, synthetic construct
  REGION 1..18: note = Ab0903 CDR H3
YYEWYKYDLYAGSLGFDY

SEQ ID NO: 1320 - protein, 214 aa, synthetic construct; identical to SEQ ID NO: 857
  REGION 1..214: note = LC sequence

SEQ ID NO: 1321 - protein, 11 aa, synthetic construct
  REGION 1..11: note = CDR L1
RASQSVSSAVA

SEQ ID NO: 1322 - protein, 7 aa, synthetic construct
  REGION 1..7: note = CDR L2
SASSLYS

SEQ ID NO: 1323 - protein, 9 aa, synthetic construct
  REGION 1..9: note = CDR L3
QQGGYSLIT

SEQ ID NO: 1324 - protein, 214 aa, synthetic construct; identical to SEQ ID NO: 857
  REGION 1..214: note = Ab0935 LC

SEQ ID NO: 1325 - protein, 457 aa, synthetic construct
  REGION 1..457: note = Ab0935 HC
EVQLVESGGGLVQPGGSLRLSCAASGFDFSSASIHWVRQAPGKGLEWVASISPYYGSTYYADSVKGRFTISADTSKNTAYLQMNSLRAEDTAVYYCARYYEWYKYDLYLGSLGFDYWGQGTLVTVSSASTKGPSVFPLAPSSKSTSGGTAALGCLVKDYFPEPVTVSWNSGALTSGVHTFPAVLQSSGLYSLSSVVTVPSSSLGTQTYICNVNHKPSNTKVDKKVEPKSCDKTHTCPPCPAPEAAGGPSVFLFPPKPKDTLMISRTPEVTCVVVDVSHEDPEVKFNWYVDGVEVHNAKTKPREEQYNSTYRVVSVLTVLHQDWLNGKEYKCKVSNKALGAPIEKTISKAKGQPREPQVYTLPPSRDELTKNQVSLTCLVKGFYPSDIAVEWESNGQPENNYKTTPPVLDSDGSFFLYSKLTVDKSRWQQGNVFSCSVMHEALHNHYTQKSLSLSPGK

SEQ ID NO: 1326 - protein, 5 aa, synthetic construct
  REGION 1..5: note = Ab0935 CDR H1
SASIH

SEQ ID NO: 1327 - protein, 17 aa, synthetic construct
  REGION 1..17: note = Ab0935 CDR H2
SISPYYGSTYYADSVKG

SEQ ID NO: 1328 - protein, 18 aa, synthetic construct
  REGION 1..18: note = Ab0935 CDR H3
YYEWYKYDLYLGSLGFDY

SEQ ID NO: 1329 - protein, 11 aa, synthetic construct
  REGION 1..11: note = Ab0935 CDR L1
RASQSVSSAVA

SEQ ID NO: 1330 - protein, 7 aa, synthetic construct
  REGION 1..7: note = Ab0935 CDR L2
SASSLYS

SEQ ID NO: 1331 - protein, 9 aa, synthetic construct
  REGION 1..9: note = Ab0935 CDR L3
QQGGYSLIT

SEQ ID NO: 1332 - protein, 214 aa, synthetic construct; identical to SEQ ID NO: 857
  REGION 1..214: note = Ab0936 LC

SEQ ID NO: 1333 - protein, 457 aa, synthetic construct
  REGION 1..457: note = Ab0936 HC
EVQLVESGGGLVQPGGSLRLSCAASGFDFSSYSIHWVRQAPGKGLEWVAAISPYYGSTYYADSVKGRFTISADTSKNTAYLQMNSLRAEDTAVYYCARYYEWYKYDLYLGSLGFDYWGQGTLVTVSSASTKGPSVFPLAPSSKSTSGGTAALGCLVKDYFPEPVTVSWNSGALTSGVHTFPAVLQSSGLYSLSSVVTVPSSSLGTQTYICNVNHKPSNTKVDKKVEPKSCDKTHTCPPCPAPEAAGGPSVFLFPPKPKDTLMISRTPEVTCVVVDVSHEDPEVKFNWYVDGVEVHNAKTKPREEQYNSTYRVVSVLTVLHQDWLNGKEYKCKVSNKALGAPIEKTISKAKGQPREPQVYTLPPSRDELTKNQVSLTCLVKGFYPSDIAVEWESNGQPENNYKTTPPVLDSDGSFFLYSKLTVDKSRWQQGNVFSCSVMHEALHNHYTQKSLSLSPGK

SEQ ID NO: 1334 - protein, 5 aa, synthetic construct
  REGION 1..5: note = Ab0936 CDR H1
SYSIH

SEQ ID NO: 1335 - protein, 17 aa, synthetic construct
  REGION 1..17: note = Ab0936 CDR H2
AISPYYGSTYYADSVKG

SEQ ID NO: 1336 - protein, 18 aa, synthetic construct
  REGION 1..18: note = Ab0936 CDR H3
YYEWYKYDLYLGSLGFDY

SEQ ID NO: 1337 - protein, 11 aa, synthetic construct
  REGION 1..11: note = Ab0936 CDR L1
RASQSVSSAVA

SEQ ID NO: 1338 - protein, 7 aa, synthetic construct
  REGION 1..7: note = Ab0936 CDR L2
SASSLYS

SEQ ID NO: 1339 - protein, 9 aa, synthetic construct
  REGION 1..9: note = Ab0936 CDR L3
QQGGYSLIT

SEQ ID NO: 1340 - protein, 214 aa, synthetic construct; identical to SEQ ID NO: 857
  REGION 1..214: note = Ab0937 LC

SEQ ID NO: 1341 - protein, 457 aa, synthetic construct
  REGION 1..457: note = Ab0937 HC
EVQLVESGGGLVQPGGSLRLSCAASGFDFSSYSIHWVRQAPGKGLEWVASASPYYGSTYYADSVKGRFTISADTSKNTAYLQMNSLRAEDTAVYYCARYYEWYKYDLYLGSLGFDYWGQGTLVTVSSASTKGPSVFPLAPSSKSTSGGTAALGCLVKDYFPEPVTVSWNSGALTSGVHTFPAVLQSSGLYSLSSVVTVPSSSLGTQTYICNVNHKPSNTKVDKKVEPKSCDKTHTCPPCPAPEAAGGPSVFLFPPKPKDTLMISRTPEVTCVVVDVSHEDPEVKFNWYVDGVEVHNAKTKPREEQYNSTYRVVSVLTVLHQDWLNGKEYKCKVSNKALGAPIEKTISKAKGQPREPQVYTLPPSRDELTKNQVSLTCLVKGFYPSDIAVEWESNGQPENNYKTTPPVLDSDGSFFLYSKLTVDKSRWQQGNVFSCSVMHEALHNHYTQKSLSLSPGK

SEQ ID NO: 1342 - protein, 5 aa, synthetic construct
  REGION 1..5: note = Ab0937 CDR H1
SYSIH

SEQ ID NO: 1343 - protein, 17 aa, synthetic construct
  REGION 1..17: note = Ab0937 CDR H2
SASPYYGSTYYADSVKG

SEQ ID NO: 1344 - protein, 18 aa, synthetic construct
  REGION 1..18: note = Ab0937 CDR H3
YYEWYKYDLYLGSLGFDY

SEQ ID NO: 1345 - protein, 11 aa, synthetic construct
  REGION 1..11: note = Ab0937 CDR L1
RASQSVSSAVA

SEQ ID NO: 1346 - protein, 7 aa, synthetic construct
  REGION 1..7: note = Ab0937 CDR L2
SASSLYS

SEQ ID NO: 1347 - protein, 9 aa, synthetic construct
  REGION 1..9: note = Ab0937 CDR L3
QQGGYSLIT

SEQ ID NO: 1348 - protein, 214 aa, synthetic construct; identical to SEQ ID NO: 857
  REGION 1..214: note = Ab0938 LC

SEQ ID NO: 1349 - protein, 457 aa, synthetic construct
  REGION 1..457: note = Ab0938 HC
EVQLVESGGGLVQPGGSLRLSCAASGFDFSSYSIHWVRQAPGKGLEWVASIAPYYGSTYYADSVKGRFTISADTSKNTAYLQMNSLRAEDTAVYYCARYYEWYKYDLYLGSLGFDYWGQGTLVTVSSASTKGPSVFPLAPSSKSTSGGTAALGCLVKDYFPEPVTVSWNSGALTSGVHTFPAVLQSSGLYSLSSVVTVPSSSLGTQTYICNVNHKPSNTKVDKKVEPKSCDKTHTCPPCPAPEAAGGPSVFLFPPKPKDTLMISRTPEVTCVVVDVSHEDPEVKFNWYVDGVEVHNAKTKPREEQYNSTYRVVSVLTVLHQDWLNGKEYKCKVSNKALGAPIEKTISKAKGQPREPQVYTLPPSRDELTKNQVSLTCLVKGFYPSDIAVEWESNGQPENNYKTTPPVLDSDGSFFLYSKLTVDKSRWQQGNVFSCSVMHEALHNHYTQKSLSLSPGK

SEQ ID NO: 1350 - protein, 5 aa, synthetic construct
  REGION 1..5: note = Ab0938 CDR H1
SYSIH

SEQ ID NO: 1351 - protein, 17 aa, synthetic construct
  REGION 1..17: note = Ab0938 CDR H2
SIAPYYGSTYYADSVKG

SEQ ID NO: 1352 - protein, 18 aa, synthetic construct
  REGION 1..18: note = Ab0938 CDR H3
YYEWYKYDLYLGSLGFDY

SEQ ID NO: 1353 - protein, 11 aa, synthetic construct
  REGION 1..11: note = Ab0938 CDR L1
RASQSVSSAVA

SEQ ID NO: 1354 - protein, 7 aa, synthetic construct
  REGION 1..7: note = Ab0938 CDR L2
SASSLYS

SEQ ID NO: 1355 - protein, 9 aa, synthetic construct
  REGION 1..9: note = Ab0938 CDR L3
QQGGYSLIT

SEQ ID NO: 1356 - protein, 214 aa, synthetic construct; identical to SEQ ID NO: 857
  REGION 1..214: note = Ab0939 LC

SEQ ID NO: 1357 - protein, 457 aa, synthetic construct
  REGION 1..457: note = Ab0939 HC
EVQLVESGGGLVQPGGSLRLSCAASGFDFSSYSIHWVRQAPGKGLEWVASISAYYGSTYYADSVKGRFTISADTSKNTAYLQMNSLRAEDTAVYYCARYYEWYKYDLYLGSLGFDYWGQGTLVTVSSASTKGPSVFPLAPSSKSTSGGTAALGCLVKDYFPEPVTVSWNSGALTSGVHTFPAVLQSSGLYSLSSVVTVPSSSLGTQTYICNVNHKPSNTKVDKKVEPKSCDKTHTCPPCPAPEAAGGPSVFLFPPKPKDTLMISRTPEVTCVVVDVSHEDPEVKFNWYVDGVEVHNAKTKPREEQYNSTYRVVSVLTVLHQDWLNGKEYKCKVSNKALGAPIEKTISKAKGQPREPQVYTLPPSRDELTKNQVSLTCLVKGFYPSDIAVEWESNGQPENNYKTTPPVLDSDGSFFLYSKLTVDKSRWQQGNVFSCSVMHEALHNHYTQKSLSLSPGK

SEQ ID NO: 1358 - protein, 5 aa, synthetic construct
  REGION 1..5: note = Ab0939 CDR H1
SYSIH

SEQ ID NO: 1359 - protein, 17 aa, synthetic construct
  REGION 1..17: note = Ab0939 CDR H2
SISAYYGSTYYADSVKG

SEQ ID NO: 1360 - protein, 18 aa, synthetic construct
  REGION 1..18: note = Ab0939 CDR H3
YYEWYKYDLYLGSLGFDY

SEQ ID NO: 1361 - protein, 11 aa, synthetic construct
  REGION 1..11: note = Ab0939 CDR L1
RASQSVSSAVA

SEQ ID NO: 1362 - protein, 7 aa, synthetic construct
  REGION 1..7: note = Ab0939 CDR L2
SASSLYS

SEQ ID NO: 1363 - protein, 9 aa, synthetic construct
  REGION 1..9: note = Ab0939 CDR L3
QQGGYSLIT

SEQ ID NO: 1364 - protein, 214 aa, synthetic construct; identical to SEQ ID NO: 857
  REGION 1..214: note = Ab0940 LC

SEQ ID NO: 1365 - protein, 457 aa, synthetic construct
  REGION 1..457: note = Ab0940 HC
EVQLVESGGGLVQPGGSLRLSCAASGFDFSSYSIHWVRQAPGKGLEWVASISPYYASTYYADSVKGRFTISADTSKNTAYLQMNSLRAEDTAVYYCARYYEWYKYDLYLGSLGFDYWGQGTLVTVSSASTKGPSVFPLAPSSKSTSGGTAALGCLVKDYFPEPVTVSWNSGALTSGVHTFPAVLQSSGLYSLSSVVTVPSSSLGTQTYICNVNHKPSNTKVDKKVEPKSCDKTHTCPPCPAPEAAGGPSVFLFPPKPKDTLMISRTPEVTCVVVDVSHEDPEVKFNWYVDGVEVHNAKTKPREEQYNSTYRVVSVLTVLHQDWLNGKEYKCKVSNKALGAPIEKTISKAKGQPREPQVYTLPPSRDELTKNQVSLTCLVKGFYPSDIAVEWESNGQPENNYKTTPPVLDSDGSFFLYSKLTVDKSRWQQGNVFSCSVMHEALHNHYTQKSLSLSPGK

SEQ ID NO: 1366 - protein, 5 aa, synthetic construct
  REGION 1..5: note = Ab0940 CDR H1
SYSIH

SEQ ID NO: 1367 - protein, 17 aa, synthetic construct
  REGION 1..17: note = Ab0940 CDR H2
SISPYYASTYYADSVKG

SEQ ID NO: 1368 - protein, 18 aa, synthetic construct
  REGION 1..18: note = Ab0940 CDR H2
YYEWYKYDLYLGSLGFDY

SEQ ID NO: 1369 - protein, 11 aa, synthetic construct
  REGION 1..11: note = Ab0940 CDR L1
RASQSVSSAVA

SEQ ID NO: 1370 - protein, 7 aa, synthetic construct
  REGION 1..7: note = Ab0940 CDR L2
SASSLYS

SEQ ID NO: 1371 - protein, 9 aa, synthetic construct
  REGION 1..9: note = Ab0940 CDR L3
QQGGYSLIT

SEQ ID NO: 1372 - protein, 214 aa, synthetic construct; identical to SEQ ID NO: 857
  REGION 1..214: note = Ab0941 LC

SEQ ID NO: 1373 - protein, 457 aa, synthetic construct
  REGION 1..457: note = Ab0941 HC
EVQLVESGGGLVQPGGSLRLSCAASGFDFSSYSIHWVRQAPGKGLEWVASISPYYGATYYADSVKGRFTISADTSKNTAYLQMNSLRAEDTAVYYCARYYEWYKYDLYLGSLGFDYWGQGTLVTVSSASTKGPSVFPLAPSSKSTSGGTAALGCLVKDYFPEPVTVSWNSGALTSGVHTFPAVLQSSGLYSLSSVVTVPSSSLGTQTYICNVNHKPSNTKVDKKVEPKSCDKTHTCPPCPAPEAAGGPSVFLFPPKPKDTLMISRTPEVTCVVVDVSHEDPEVKFNWYVDGVEVHNAKTKPREEQYNSTYRVVSVLTVLHQDWLNGKEYKCKVSNKALGAPIEKTISKAKGQPREPQVYTLPPSRDELTKNQVSLTCLVKGFYPSDIAVEWESNGQPENNYKTTPPVLDSDGSFFLYSKLTVDKSRWQQGNVFSCSVMHEALHNHYTQKSLSLSPGK

SEQ ID NO: 1374 - protein, 5 aa, synthetic construct
  REGION 1..5: note = Ab0941 CDR H1
SYSIH

SEQ ID NO: 1375 - protein, 17 aa, synthetic construct
  REGION 1..17: note = Ab0941 CDR H2
SISPYYGATYYADSVKG

SEQ ID NO: 1376 - protein, 18 aa, synthetic construct
  REGION 1..18: note = Ab0941 CDR H3
YYEWYKYDLYLGSLGFDY

SEQ ID NO: 1377 - protein, 11 aa, synthetic construct
  REGION 1..11: note = Ab0941 CDR L1
RASQSVSSAVA

SEQ ID NO: 1378 - protein, 7 aa, synthetic construct
  REGION 1..7: note = Ab0941 CDR L2
SASSLYS

SEQ ID NO: 1379 - protein, 9 aa, synthetic construct
  REGION 1..9: note = Ab0941 CDR L3
QQGGYSLIT

SEQ ID NO: 1380 - protein, 214 aa, synthetic construct; identical to SEQ ID NO: 857
  REGION 1..214: note = Ab0942 LC

SEQ ID NO: 1381 - protein, 457 aa, synthetic construct
  REGION 1..457: note = Ab0942 HC
EVQLVESGGGLVQPGGSLRLSCAASGFDFSSYSIHWVRQAPGKGLEWVASISPYYGSTYYADSVKGRFTISADTSKNTAYLQMNSLRAEDTAVYYCARYYAWYKYDLYLGSLGFDYWGQGTLVTVSSASTKGPSVFPLAPSSKSTSGGTAALGCLVKDYFPEPVTVSWNSGALTSGVHTFPAVLQSSGLYSLSSVVTVPSSSLGTQTYICNVNHKPSNTKVDKKVEPKSCDKTHTCPPCPAPEAAGGPSVFLFPPKPKDTLMISRTPEVTCVVVDVSHEDPEVKFNWYVDGVEVHNAKTKPREEQYNSTYRVVSVLTVLHQDWLNGKEYKCKVSNKALGAPIEKTISKAKGQPREPQVYTLPPSRDELTKNQVSLTCLVKGFYPSDIAVEWESNGQPENNYKTTPPVLDSDGSFFLYSKLTVDKSRWQQGNVFSCSVMHEALHNHYTQKSLSLSPGK

SEQ ID NO: 1382 - protein, 5 aa, synthetic construct
  REGION 1..5: note = Ab0942 CDR H1
SYSIH

SEQ ID NO: 1383 - protein, 17 aa, synthetic construct
  REGION 1..17: note = Ab0942 CDR H2
SISPYYGSTYYADSVKG

SEQ ID NO: 1384 - protein, 18 aa, synthetic construct
  REGION 1..18: note = Ab0942 CDR H3
YYAWYKYDLYLGSLGFDY

SEQ ID NO: 1385 - protein, 11 aa, synthetic construct
  REGION 1..11: note = Ab0942 CDR L1
RASQSVSSAVA

SEQ ID NO: 1386 - protein, 7 aa, synthetic construct
  REGION 1..7: note = Ab0942 CDR L2
SASSLYS

SEQ ID NO: 1387 - protein, 9 aa, synthetic construct
  REGION 1..9: note = Ab0942 CDR L3
QQGGYSLIT

SEQ ID NO: 1388 - protein, 214 aa, synthetic construct; identical to SEQ ID NO: 857
  REGION 1..214: note = Ab0943 LC

SEQ ID NO: 1389 - protein, 457 aa, synthetic construct
  REGION 1..457: note = Ab0943 HC
EVQLVESGGGLVQPGGSLRLSCAASGFDFSSYSIHWVRQAPGKGLEWVASISPYYGSTYYADSVKGRFTISADTSKNTAYLQMNSLRAEDTAVYYCARYYEWYAYDLYLGSLGFDYWGQGTLVTVSSASTKGPSVFPLAPSSKSTSGGTAALGCLVKDYFPEPVTVSWNSGALTSGVHTFPAVLQSSGLYSLSSVVTVPSSSLGTQTYICNVNHKPSNTKVDKKVEPKSCDKTHTCPPCPAPEAAGGPSVFLFPPKPKDTLMISRTPEVTCVVVDVSHEDPEVKFNWYVDGVEVHNAKTKPREEQYNSTYRVVSVLTVLHQDWLNGKEYKCKVSNKALGAPIEKTISKAKGQPREPQVYTLPPSRDELTKNQVSLTCLVKGFYPSDIAVEWESNGQPENNYKTTPPVLDSDGSFFLYSKLTVDKSRWQQGNVFSCSVMHEALHNHYTQKSLSLSPGK

SEQ ID NO: 1390 - protein, 5 aa, synthetic construct
  REGION 1..5: note = Ab0943 CDR H1
SYSIH

SEQ ID NO: 1391 - protein, 17 aa, synthetic construct
  REGION 1..17: note = Ab0943 CDR H2
SISPYYGSTYYADSVKG

SEQ ID NO: 1392 - protein, 18 aa, synthetic construct
  REGION 1..18: note = Ab0943 CDR H3
YYEWYAYDLYLGSLGFDY

SEQ ID NO: 1393 - protein, 11 aa, synthetic construct
  REGION 1..11: note = Ab0943 CDR L1
RASQSVSSAVA

SEQ ID NO: 1394 - protein, 7 aa, synthetic construct
  REGION 1..7: note = Ab0943 CDR L2
SASSLYS

SEQ ID NO: 1395 - protein, 9 aa, synthetic construct
  REGION 1..9: note = Ab0943 CDR L3
QQGGYSLIT

SEQ ID NO: 1396 - protein, 214 aa, synthetic construct; identical to SEQ ID NO: 857
  REGION 1..214: note = Ab0944 LC

SEQ ID NO: 1397 - protein, 457 aa, synthetic construct
  REGION 1..457: note = Ab0944 HC
EVQLVESGGGLVQPGGSLRLSCAASGFDFSSYSIHWVRQAPGKGLEWVASISPYYGSTYYADSVKGRFTISADTSKNTAYLQMNSLRAEDTAVYYCARYYEWYKYALYLGSLGFDYWGQGTLVTVSSASTKGPSVFPLAPSSKSTSGGTAALGCLVKDYFPEPVTVSWNSGALTSGVHTFPAVLQSSGLYSLSSVVTVPSSSLGTQTYICNVNHKPSNTKVDKKVEPKSCDKTHTCPPCPAPEAAGGPSVFLFPPKPKDTLMISRTPEVTCVVVDVSHEDPEVKFNWYVDGVEVHNAKTKPREEQYNSTYRVVSVLTVLHQDWLNGKEYKCKVSNKALGAPIEKTISKAKGQPREPQVYTLPPSRDELTKNQVSLTCLVKGFYPSDIAVEWESNGQPENNYKTTPPVLDSDGSFFLYSKLTVDKSRWQQGNVFSCSVMHEALHNHYTQKSLSLSPGK

SEQ ID NO: 1398 - protein, 5 aa, synthetic construct
  REGION 1..5: note = Ab0944 CDR H1
SYSIH

SEQ ID NO: 1399 - protein, 17 aa, synthetic construct
  REGION 1..17: note = Ab0944 CDR H2
SISPYYGSTYYADSVKG

SEQ ID NO: 1400 - protein, 18 aa, synthetic construct
  REGION 1..18: note = Ab0944 CDR H3
YYEWYKYALYLGSLGFDY

SEQ ID NO: 1401 - protein, 11 aa, synthetic construct
  REGION 1..11: note = Ab0944 CDR L1
RASQSVSSAVA

SEQ ID NO: 1402 - protein, 7 aa, synthetic construct
  REGION 1..7: note = Ab0944 CDR L2
SASSLYS

SEQ ID NO: 1403 - protein, 9 aa, synthetic construct
  REGION 1..9: note = Ab0944 CDR L3
QQGGYSLIT

SEQ ID NO: 1404 - protein, 214 aa, synthetic construct; identical to SEQ ID NO: 857
  REGION 1..214: note = Ab0945 LC

SEQ ID NO: 1405 - protein, 457 aa, synthetic construct
  REGION 1..457: note = Ab0945 HC
EVQLVESGGGLVQPGGSLRLSCAASGFDFSSYSIHWVRQAPGKGLEWVASISPYYGSTYYADSVKGRFTISADTSKNTAYLQMNSLRAEDTAVYYCARYYEWYKYDAYLGSLGFDYWGQGTLVTVSSASTKGPSVFPLAPSSKSTSGGTAALGCLVKDYFPEPVTVSWNSGALTSGVHTFPAVLQSSGLYSLSSVVTVPSSSLGTQTYICNVNHKPSNTKVDKKVEPKSCDKTHTCPPCPAPEAAGGPSVFLFPPKPKDTLMISRTPEVTCVVVDVSHEDPEVKFNWYVDGVEVHNAKTKPREEQYNSTYRVVSVLTVLHQDWLNGKEYKCKVSNKALGAPIEKTISKAKGQPREPQVYTLPPSRDELTKNQVSLTCLVKGFYPSDIAVEWESNGQPENNYKTTPPVLDSDGSFFLYSKLTVDKSRWQQGNVFSCSVMHEALHNHYTQKSLSLSPGK

SEQ ID NO: 1406 - protein, 5 aa, synthetic construct
  REGION 1..5: note = Ab0945 CDR H1
SYSIH

SEQ ID NO: 1407 - protein, 17 aa, synthetic construct
  REGION 1..17: note = Ab0945 CDR H2
SISPYYGSTYYADSVKG

SEQ ID NO: 1408 - protein, 18 aa, synthetic construct
  REGION 1..18: note = Ab0945 CDR H3
YYEWYKYDAYLGSLGFDY

SEQ ID NO: 1409 - protein, 11 aa, synthetic construct
  REGION 1..11: note = Ab0945 CDR L1
RASQSVSSAVA

SEQ ID NO: 1410 - protein, 7 aa, synthetic construct
  REGION 1..7: note = Ab0945 CDR L2
SASSLYS

SEQ ID NO: 1411 - protein, 9 aa, synthetic construct
  REGION 1..9: note = Ab0945 CDR L3
QQGGYSLIT

SEQ ID NO: 1412 - protein, 214 aa, synthetic construct; identical to SEQ ID NO: 857
  REGION 1..214: note = Ab0946 LC

SEQ ID NO: 1413 - protein, 457 aa, synthetic construct
  REGION 1..457: note = Ab0946 HC
EVQLVESGGGLVQPGGSLRLSCAASGFDFSSYSIHWVRQAPGKGLEWVASISPYYGSTYYADSVKGRFTISADTSKNTAYLQMNSLRAEDTAVYYCARYYEWYKYDLYLGSLAFDYWGQGTLVTVSSASTKGPSVFPLAPSSKSTSGGTAALGCLVKDYFPEPVTVSWNSGALTSGVHTFPAVLQSSGLYSLSSVVTVPSSSLGTQTYICNVNHKPSNTKVDKKVEPKSCDKTHTCPPCPAPEAAGGPSVFLFPPKPKDTLMISRTPEVTCVVVDVSHEDPEVKFNWYVDGVEVHNAKTKPREEQYNSTYRVVSVLTVLHQDWLNGKEYKCKVSNKALGAPIEKTISKAKGQPREPQVYTLPPSRDELTKNQVSLTCLVKGFYPSDIAVEWESNGQPENNYKTTPPVLDSDGSFFLYSKLTVDKSRWQQGNVFSCSVMHEALHNHYTQKSLSLSPGK

SEQ ID NO: 1414 - protein, 5 aa, synthetic construct
  REGION 1..5: note = Ab0946 CDR H1
SYSIH

SEQ ID NO: 1415 - protein, 17 aa, synthetic construct
  REGION 1..17: note = Ab0946 CDR H2
SISPYYGSTYYADSVKG

SEQ ID NO: 1416 - protein, 18 aa, synthetic construct
  REGION 1..18: note = Ab0946 CDR H3
YYEWYKYDLYLGSLAFDY

SEQ ID NO: 1417 - protein, 11 aa, synthetic construct
  REGION 1..11: note = Ab0946 CDR L1
RASQSVSSAVA

SEQ ID NO: 1418 - protein, 7 aa, synthetic construct
  REGION 1..7: note = Ab0946 CDR L2
SASSLYS

SEQ ID NO: 1419 - protein, 9 aa, synthetic construct
  REGION 1..9: note = Ab0946 CDR L3
QQGGYSLIT

SEQ ID NO: 1420 - protein, 214 aa, synthetic construct; identical to SEQ ID NO: 857
  REGION 1..214: note = Ab0947 LC

SEQ ID NO: 1421 - protein, 457 aa, synthetic construct
  REGION 1..457: note = Ab0947 HC
EVQLVESGGGLVQPGGSLRLSCAASGFDFSSYSIHWVRQAPGKGLEWVASISPYYGSTYYADSVKGRFTISADTSKNTAYLQMNSLRAEDTAVYYCARYYEWYKYDLYLGSLGFAYWGQGTLVTVSSASTKGPSVFPLAPSSKSTSGGTAALGCLVKDYFPEPVTVSWNSGALTSGVHTFPAVLQSSGLYSLSSVVTVPSSSLGTQTYICNVNHKPSNTKVDKKVEPKSCDKTHTCPPCPAPEAAGGPSVFLFPPKPKDTLMISRTPEVTCVVVDVSHEDPEVKFNWYVDGVEVHNAKTKPREEQYNSTYRVVSVLTVLHQDWLNGKEYKCKVSNKALGAPIEKTISKAKGQPREPQVYTLPPSRDELTKNQVSLTCLVKGFYPSDIAVEWESNGQPENNYKTTPPVLDSDGSFFLYSKLTVDKSRWQQGNVFSCSVMHEALHNHYTQKSLSLSPGK

SEQ ID NO: 1422 - protein, 5 aa, synthetic construct
  REGION 1..5: note = Ab0947 CDR H1
SYSIH

SEQ ID NO: 1423 - protein, 17 aa, synthetic construct
  REGION 1..17: note = Ab0947 CDR H2
SISPYYGSTYYADSVKG

SEQ ID NO: 1424 - protein, 18 aa, synthetic construct
  REGION 1..18: note = Ab0947 CDR H3
YYEWYKYDLYLGSLGFAY

SEQ ID NO: 1425 - protein, 11 aa, synthetic construct
  REGION 1..11: note = Ab0947 CDR L1
RASQSVSSAVA

SEQ ID NO: 1426 - protein, 7 aa, synthetic construct
  REGION 1..7: note = Ab0947 CDR L2
SASSLYS

SEQ ID NO: 1427 - protein, 9 aa, synthetic construct
  REGION 1..9: note = Ab0947 CDR L3
QQGGYSLIT

SEQ ID NO: 1428 - protein, 214 aa, synthetic construct; identical to SEQ ID NO: 857
  REGION 1..214: note = Ab0948 LC

SEQ ID NO: 1429 - protein, 457 aa, synthetic construct
  REGION 1..457: note = Ab0948 HC
EVQLVESGGGLVQPGGSLRLSCAASGFDFSSYSIHWVRQAPGKGLEWVASISPYYGSTYYADSVKGRFTISADTSKNTAYLQMNSLRAEDTAVYYCARYYEWYKYDLYLGSLGFDAWGQGTLVTVSSASTKGPSVFPLAPSSKSTSGGTAALGCLVKDYFPEPVTVSWNSGALTSGVHTFPAVLQSSGLYSLSSVVTVPSSSLGTQTYICNVNHKPSNTKVDKKVEPKSCDKTHTCPPCPAPEAAGGPSVFLFPPKPKDTLMISRTPEVTCVVVDVSHEDPEVKFNWYVDGVEVHNAKTKPREEQYNSTYRVVSVLTVLHQDWLNGKEYKCKVSNKALGAPIEKTISKAKGQPREPQVYTLPPSRDELTKNQVSLTCLVKGFYPSDIAVEWESNGQPENNYKTTPPVLDSDGSFFLYSKLTVDKSRWQQGNVFSCSVMHEALHNHYTQKSLSLSPGK

SEQ ID NO: 1430 - protein, 5 aa, synthetic construct
  REGION 1..5: note = Ab0948 CDR H1
SYSIH

SEQ ID NO: 1431 - protein, 17 aa, synthetic construct
  REGION 1..17: note = Ab0948 CDR H2
SISPYYGSTYYADSVKG

SEQ ID NO: 1432 - protein, 18 aa, synthetic construct
  REGION 1..18: note = Ab0948 CDR H3
YYEWYKYDLYLGSLGFDA

SEQ ID NO: 1433 - protein, 11 aa, synthetic construct
  REGION 1..11: note = Ab0948 CDR L1
RASQSVSSAVA

SEQ ID NO: 1434 - protein, 7 aa, synthetic construct
  REGION 1..7: note = Ab0948 CDR L2
SASSLYS

SEQ ID NO: 1435 - protein, 9 aa, synthetic construct
  REGION 1..9: note = Ab0948 CDR L3
QQGGYSLIT

SEQ ID NO: 1436 - protein, 214 aa, synthetic construct
  REGION 1..214: note = Ab0949 LC
DIQMTQSPSSLSASVGDRVTITCRASASVSSAVAWYQQKPGKAPKLLIYSASSLYSGVPSRFSGSRSGTDFTLTISSLQPEDFATYYCQQGGYSLITFGQGTKVEIKRTVAAPSVFIFPPSDSQLKSGTASVVCLLNNFYPREAKVQWKVDNALQSGNSQESVTEQDSKDSTYSLSSTLTLSKADYEKHKVYACEVTHQGLSSPVTKSFNRGEC

SEQ ID NO: 1437 - protein, 457 aa, synthetic construct; identical to SEQ ID NO: 1252
  REGION 1..457: note = Ab0949 HC

SEQ ID NO: 1438 - protein, 5 aa, synthetic construct
  REGION 1..5: note = Ab0949 CDR H1
SYSIH

SEQ ID NO: 1439 - protein, 17 aa, synthetic construct
  REGION 1..17: note = Ab0949 CDR H2
SISPYYGSTYYADSVKG

SEQ ID NO: 1440 - protein, 18 aa, synthetic construct
  REGION 1..18: note = Ab0949 CDR H3
YYEWYKYDLYLGSLGFDY

SEQ ID NO: 1441 - protein, 11 aa, synthetic construct
  REGION 1..11: note = Ab0494 CDR L1
RASASVSSAVA

SEQ ID NO: 1442 - protein, 7 aa, synthetic construct
  REGION 1..7: note = Ab0949 CDR L2
SASSLYS

SEQ ID NO: 1443 - protein, 9 aa, synthetic construct
  REGION 1..9: note = Ab0949 CDR L3
QQGGYSLIT

SEQ ID NO: 1444 - protein, 214 aa, synthetic construct
  REGION 1..214: note = Ab0950 LC
DIQMTQSPSSLSASVGDRVTITCRASQSVSSAVAWYQQKPGKAPKLLIASASSLYSGVPSRFSGSRSGTDFTLTISSLQPEDFATYYCQQGGYSLITFGQGTKVEIKRTVAAPSVFIFPPSDSQLKSGTASVVCLLNNFYPREAKVQWKVDNALQSGNSQESVTEQDSKDSTYSLSSTLTLSKADYEKHKVYACEVTHQGLSSPVTKSFNRGEC

SEQ ID NO: 1445 - protein, 457 aa, synthetic construct; identical to SEQ ID NO: 1252
  REGION 1..457: note = Ab0950 HC

SEQ ID NO: 1446 - protein, 5 aa, synthetic construct
  REGION 1..5: note = Ab0950 CDR H1
SYSIH

SEQ ID NO: 1447 - protein, 17 aa, synthetic construct
  REGION 1..17: note = Ab0950 CDR H2
SISPYYGSTYYADSVKG

SEQ ID NO: 1448 - protein, 18 aa, synthetic construct
  REGION 1..18: note = Ab0950 CDR H3
YYEWYKYDLYLGSLGFDY

SEQ ID NO: 1449 - protein, 11 aa, synthetic construct
  REGION 1..11: note = Ab0950 CDR L1
RASQSVSSAVA

SEQ ID NO: 1450 - protein, 7 aa, synthetic construct
  REGION 1..7: note = Ab0950 CDR L2
SASSLYS

SEQ ID NO: 1451 - protein, 9 aa, synthetic construct
  REGION 1..9: note = Ab0950 CDR L3
QQGGYSLIT

SEQ ID NO: 1452 - protein, 214 aa, synthetic construct
  REGION 1..214: note = Ab0951 LC
DIQMTQSPSSLSASVGDRVTITCRASQSVSSAVAWYQQKPGKAPKLLIYSASSLASGVPSRFSGSRSGTDFTLTISSLQPEDFATYYCQQGGYSLITFGQGTKVEIKRTVAAPSVFIFPPSDSQLKSGTASVVCLLNNFYPREAKVQWKVDNALQSGNSQESVTEQDSKDSTYSLSSTLTLSKADYEKHKVYACEVTHQGLSSPVTKSFNRGEC

SEQ ID NO: 1453 - protein, 457 aa, synthetic construct; identical to SEQ ID NO: 1252
  REGION 1..457: note = Ab0951 HC

SEQ ID NO: 1454 - protein, 5 aa, synthetic construct
  REGION 1..5: note = Ab0951 CDR H1
SYSIH

SEQ ID NO: 1455 - protein, 17 aa, synthetic construct
  REGION 1..17: note = Ab0951 CDR H2
SISPYYGSTYYADSVKG

SEQ ID NO: 1456 - protein, 18 aa, synthetic construct
  REGION 1..18: note = Ab0951 CDR H3
YYEWYKYDLYLGSLGFDY

SEQ ID NO: 1457 - protein, 11 aa, synthetic construct
  REGION 1..11: note = Ab0951 CDR L1
RASQSVSSAVA

SEQ ID NO: 1458 - protein, 7 aa, synthetic construct
  REGION 1..7: note = Ab0951 CDR L2
SASSLAS

SEQ ID NO: 1459 - protein, 9 aa, synthetic construct
  REGION 1..9: note = Ab0951 CDR L3
QQGGYSLIT

SEQ ID NO: 1460 - protein, 214 aa, synthetic construct
  REGION 1..214: note = Ab0952 LC
DIQMTQSPSSLSASVGDRVTITCRASQSVSSAVAWYQQKPGKAPKLLIYSASSLYSGVPSRFSGSRSGTDFTLTISSLQPEDFATYYCQQAGYSLITFGQGTKVEIKRTVAAPSVFIFPPSDSQLKSGTASVVCLLNNFYPREAKVQWKVDNALQSGNSQESVTEQDSKDSTYSLSSTLTLSKADYEKHKVYACEVTHQGLSSPVTKSFNRGEC

SEQ ID NO: 1461 - protein, 457 aa, synthetic construct; identical to SEQ ID NO: 1252
  REGION 1..457: note = Ab0952 HC

SEQ ID NO: 1462 - protein, 5 aa, synthetic construct
  REGION 1..5: note = Ab0952 CDR H1
SYSIH

SEQ ID NO: 1463 - protein, 17 aa, synthetic construct
  REGION 1..17: note = Ab0952 CDR H2
SISPYYGSTYYADSVKG

SEQ ID NO: 1464 - protein, 18 aa, synthetic construct
  REGION 1..18: note = Ab0952 CDR H3
YYEWYKYDLYLGSLGFDY

SEQ ID NO: 1465 - protein, 11 aa, synthetic construct
  REGION 1..11: note = Ab0952 CDR L1
RASQSVSSAVA

SEQ ID NO: 1466 - protein, 7 aa, synthetic construct
  REGION 1..7: note = Ab0952 CDR L2
SASSLYS

SEQ ID NO: 1467 - protein, 9 aa, synthetic construct
  REGION 1..9: note = Ab0952 CDR L3
QQAGYSLIT

SEQ ID NO: 1468 - protein, 214 aa, synthetic construct
  REGION 1..214: note = Ab0953 LC
DIQMTQSPSSLSASVGDRVTITCRASQSVSSAVAWYQQKPGKAPKLLIYSASSLYSGVPSRFSGSRSGTDFTLTISSLQPEDFATYYCQQGAYSLITFGQGTKVEIKRTVAAPSVFIFPPSDSQLKSGTASVVCLLNNFYPREAKVQWKVDNALQSGNSQESVTEQDSKDSTYSLSSTLTLSKADYEKHKVYACEVTHQGLSSPVTKSFNRGEC

SEQ ID NO: 1469 - protein, 457 aa, synthetic construct; identical to SEQ ID NO: 1252
  REGION 1..457: note = Ab0953 HC

SEQ ID NO: 1470 - protein, 5 aa, synthetic construct
  REGION 1..5: note = Ab0953 CDR H1
SYSIH

SEQ ID NO: 1471 - protein, 17 aa, synthetic construct
  REGION 1..17: note = Ab0953 CDR H2
SISPYYGSTYYADSVKG

SEQ ID NO: 1472 - protein, 18 aa, synthetic construct
  REGION 1..18: note = Ab0953 CDR H3
YYEWYKYDLYLGSLGFDY

SEQ ID NO: 1473 - protein, 11 aa, synthetic construct
  REGION 1..11: note = Ab0953 CDR L1
RASQSVSSAVA

SEQ ID NO: 1474 - protein, 7 aa, synthetic construct
  REGION 1..7: note = Ab0953 CDR L2
SASSLYS

SEQ ID NO: 1475 - protein, 9 aa, synthetic construct
  REGION 1..9: note = Ab0953 CDR L3
QQGAYSLIT

SEQ ID NO: 1476 - protein, 214 aa, synthetic construct
  REGION 1..214: note = Ab0954 LC
DIQMTQSPSSLSASVGDRVTITCRASQSVSSAVAWYQQKPGKAPKLLIYSASSLYSGVPSRFSGSRSGTDFTLTISSLQPEDFATYYCQQGGASLITFGQGTKVEIKRTVAAPSVFIFPPSDSQLKSGTASVVCLLNNFYPREAKVQWKVDNALQSGNSQESVTEQDSKDSTYSLSSTLTLSKADYEKHKVYACEVTHQGLSSPVTKSFNRGEC

SEQ ID NO: 1477 - protein, 457 aa, synthetic construct; identical to SEQ ID NO: 1252
  REGION 1..457: note = Ab0954 HC

SEQ ID NO: 1478 - protein, 5 aa, synthetic construct
  REGION 1..5: note = Ab0954 CDR H1
SYSIH

SEQ ID NO: 1479 - protein, 17 aa, synthetic construct
  REGION 1..17: note = Ab0954 CDR H2
SISPYYGSTYYADSVKG

SEQ ID NO: 1480 - protein, 18 aa, synthetic construct
  REGION 1..18: note = Ab0954 CDR H3
YYEWYKYDLYLGSLGFDY

SEQ ID NO: 1481 - protein, 11 aa, synthetic construct
  REGION 1..11: note = Ab0954 CDR L1
RASQSVSSAVA

SEQ ID NO: 1482 - protein, 7 aa, synthetic construct
  REGION 1..7: note = Ab0954 CDR L2
SASSLYS

SEQ ID NO: 1483 - protein, 9 aa, synthetic construct
  REGION 1..9: note = Ab0954 CDR L3
QQGGASLIT

SEQ ID NO: 1484 - protein, 214 aa, synthetic construct
  REGION 1..214: note = Ab0955 LC
DIQMTQSPSSLSASVGDRVTITCRASQSVSSAVAWYQQKPGKAPKLLIYSASSLYSGVPSRFSGSRSGTDFTLTISSLQPEDFATYYCQQGGYALITFGQGTKVEIKRTVAAPSVFIFPPSDSQLKSGTASVVCLLNNFYPREAKVQWKVDNALQSGNSQESVTEQDSKDSTYSLSSTLTLSKADYEKHKVYACEVTHQGLSSPVTKSFNRGEC

SEQ ID NO: 1485 - protein, 457 aa, synthetic construct; identical to SEQ ID NO: 1252
  REGION 1..457: note = Ab0955 HC

SEQ ID NO: 1486 - protein, 5 aa, synthetic construct
  REGION 1..5: note = Ab0955 CDR H1
SYSIH

SEQ ID NO: 1487 - protein, 17 aa, synthetic construct
  REGION 1..17: note = Ab0955 CDR H2
SISPYYGSTYYADSVKG

SEQ ID NO: 1488 - protein, 18 aa, synthetic construct
  REGION 1..18: note = Ab0955 CDR H3
YYEWYKYDLYLGSLGFDY

SEQ ID NO: 1489 - protein, 11 aa, synthetic construct
  REGION 1..11: note = Ab0955 CDR L1
RASQSVSSAVA

SEQ ID NO: 1490 - protein, 7 aa, synthetic construct
  REGION 1..7: note = Ab0955 CDR L2
SASSLYS

SEQ ID NO: 1491 - protein, 9 aa, synthetic construct
  REGION 1..9: note = Ab0955 CDR L3
QQGGYALIT

SEQ ID NO: 1492 - protein, 214 aa, synthetic construct
  REGION 1..214: note = Ab0956 LC
DIQMTQSPSSLSASVGDRVTITCRASQSVSSAVAWYQQKPGKAPKLLIYSASSLYSGVPSRFSGSRSGTDFTLTISSLQPEDFATYYCQQGGYSAITFGQGTKVEIKRTVAAPSVFIFPPSDSQLKSGTASVVCLLNNFYPREAKVQWKVDNALQSGNSQESVTEQDSKDSTYSLSSTLTLSKADYEKHKVYACEVTHQGLSSPVTKSFNRGEC

SEQ ID NO: 1493 - protein, 457 aa, synthetic construct; identical to SEQ ID NO: 1252
  REGION 1..457: note = Ab0956 HC

SEQ ID NO: 1494 - protein, 5 aa, synthetic construct
  REGION 1..5: note = Ab0956 CDR H1
SYSIH

SEQ ID NO: 1495 - protein, 17 aa, synthetic construct
  REGION 1..17: note = Ab0956 CDR H2
SISPYYGSTYYADSVKG

SEQ ID NO: 1496 - protein, 18 aa, synthetic construct
  REGION 1..18: note = Ab0956 CDR H3
YYEWYKYDLYLGSLGFDY

SEQ ID NO: 1497 - protein, 11 aa, synthetic construct
  REGION 1..11: note = Ab0956 CDR L1
RASQSVSSAVA

SEQ ID NO: 1498 - protein, 7 aa, synthetic construct
  REGION 1..7: note = Ab0956 CDR L2
SASSLYS

SEQ ID NO: 1499 - protein, 9 aa, synthetic construct
  REGION 1..9: note = Ab0956 CDR L3
QQGGYSAIT

SEQ ID NO: 1500 - protein, 214 aa, synthetic construct
  REGION 1..214: note = Ab0957 LC
DIQMTQSPSSLSASVGDRVTITCRASQSVSSAVAWYQQKPGKAPKLLIYSASSLYSGVPSRFSGSRSGTDFTLTISSLQPEDFATYYCQQGGYSLATFGQGTKVEIKRTVAAPSVFIFPPSDSQLKSGTASVVCLLNNFYPREAKVQWKVDNALQSGNSQESVTEQDSKDSTYSLSSTLTLSKADYEKHKVYACEVTHQGLSSPVTKSFNRGEC

SEQ ID NO: 1501 - protein, 457 aa, synthetic construct; identical to SEQ ID NO: 1252
  REGION 1..457: note = Ab0957 HC

SEQ ID NO: 1502 - protein, 5 aa, synthetic construct
  REGION 1..5: note = Ab0957 CDR H1
SYSIH

SEQ ID NO: 1503 - protein, 17 aa, synthetic construct
  REGION 1..17: note = Ab0957 CDR H2
SISPYYGSTYYADSVKG

SEQ ID NO: 1504 - protein, 18 aa, synthetic construct
  REGION 1..18: note = Ab0957 CDR H3
YYEWYKYDLYLGSLGFDY

SEQ ID NO: 1505 - protein, 11 aa, synthetic construct
  REGION 1..11: note = Ab0957 CDR L1
RASQSVSSAVA

SEQ ID NO: 1506 - protein, 7 aa, synthetic construct
  REGION 1..7: note = Ab0957 CDR L2
SASSLYS

SEQ ID NO: 1507 - protein, 9 aa, synthetic construct
  REGION 1..9: note = Ab0957 CDR L3
QQGGYSLAT

SEQ ID NO: 1508 - protein, 214 aa, synthetic construct
  REGION 1..214: note = Ab0958 LC
DIQMTQSPSSLSASVGDRVTITCRASQSVSSAVAWYQQKPGKAPKLLIYSASSLYSGVPSRFSGSRSGTDFTLTISSLQPEDFATYYCQQGGYSLIAFGQGTKVEIKRTVAAPSVFIFPPSDSQLKSGTASVVCLLNNFYPREAKVQWKVDNALQSGNSQESVTEQDSKDSTYSLSSTLTLSKADYEKHKVYACEVTHQGLSSPVTKSFNRGEC

SEQ ID NO: 1509 - protein, 457 aa, synthetic construct; identical to SEQ ID NO: 1252
  REGION 1..457: note = Ab0958 HC

SEQ ID NO: 1510 - protein, 5 aa, synthetic construct
  REGION 1..5: note = Ab0958 CDR H1
SYSIH

SEQ ID NO: 1511 - protein, 17 aa, synthetic construct
  REGION 1..17: note = Ab0958 CDR H2
SISPYYGSTYYADSVKG

SEQ ID NO: 1512 - protein, 18 aa, synthetic construct
  REGION 1..18: note = Ab0958 CDR H3
YYEWYKYDLYLGSLGFDY

SEQ ID NO: 1513 - protein, 11 aa, synthetic construct
  REGION 1..11: note = Ab0958 CDR L1
RASQSVSSAVA

SEQ ID NO: 1514 - protein, 7 aa, synthetic construct
  REGION 1..7: note = Ab0958 CDR L2
SASSLYS

SEQ ID NO: 1515 - protein, 9 aa, synthetic construct
  REGION 1..9: note = Ab0958 CDR L3
QQGGYSLIA

SEQ ID NO: 1516 - protein, 214 aa, synthetic construct; identical to SEQ ID NO: 857
  REGION 1..214: note = Ab1034 LC

SEQ ID NO: 1517 - protein, 457 aa, synthetic construct
  REGION 1..457: note = Ab1034 HC
EVQLVESGGGLVQPGGSLRLSCAASGFDFSSYSIHWVRQAPGKGLEWVASISPYYGSTAYADSVKGRFTISADTSKNTAYLQMNSLRAEDTAVYYCARYYEWYKYDLYAGSLGFDYWGQGTLVTVSSASTKGPSVFPLAPSSKSTSGGTAALGCLVKDYFPEPVTVSWNSGALTSGVHTFPAVLQSSGLYSLSSVVTVPSSSLGTQTYICNVNHKPSNTKVDKKVEPKSCDKTHTCPPCPAPEAAGGPSVFLFPPKPKDTLMISRTPEVTCVVVDVSHEDPEVKFNWYVDGVEVHNAKTKPREEQYNSTYRVVSVLTVLHQDWLNGKEYKCKVSNKALGAPIEKTISKAKGQPREPQVYTLPPSRDELTKNQVSLTCLVKGFYPSDIAVEWESNGQPENNYKTTPPVLDSDGSFFLYSKLTVDKSRWQQGNVFSCSVMHEALHNHYTQKSLSLSPGK

SEQ ID NO: 1518 - protein, 5 aa, synthetic construct
  REGION 1..5: note = Ab1034 CDR H1
SYSIH

SEQ ID NO: 1519 - protein, 17 aa, synthetic construct
  REGION 1..17: note = Ab1034 CDR H2
SISPYYGSTAYADSVKG

SEQ ID NO: 1520 - protein, 18 aa, synthetic construct
  REGION 1..18: note = Ab1034 CDR H3
YYEWYKYDLYAGSLGFDY

SEQ ID NO: 1521 - protein, 11 aa, synthetic construct
  REGION 1..11: note = Ab1034 CDR L1
RASQSVSSAVA

SEQ ID NO: 1522 - protein, 7 aa, synthetic construct
  REGION 1..7: note = Ab1034 CDR L2
SASSLYS

SEQ ID NO: 1523 - protein, 9 aa, synthetic construct
  REGION 1..9: note = Ab1034 CDR L3
QQGGYSLIT

SEQ ID NO: 1524 - protein, 214 aa, synthetic construct; identical to SEQ ID NO: 857
  REGION 1..214: note = Ab1035 LC

SEQ ID NO: 1525 - protein, 457 aa, synthetic construct
  REGION 1..457: note = Ab1035 HC
EVQLVESGGGLVQPGGSLRLSCAASGFDFSSYSIHWVRQAPGKGLEWVASISPYYGSTYYADSVKGRFTISADTSKNTAYLQMNSLRAEDTAVYYCARAYEWYKYDLYAGSLGFDYWGQGTLVTVSSASTKGPSVFPLAPSSKSTSGGTAALGCLVKDYFPEPVTVSWNSGALTSGVHTFPAVLQSSGLYSLSSVVTVPSSSLGTQTYICNVNHKPSNTKVDKKVEPKSCDKTHTCPPCPAPEAAGGPSVFLFPPKPKDTLMISRTPEVTCVVVDVSHEDPEVKFNWYVDGVEVHNAKTKPREEQYNSTYRVVSVLTVLHQDWLNGKEYKCKVSNKALGAPIEKTISKAKGQPREPQVYTLPPSRDELTKNQVSLTCLVKGFYPSDIAVEWESNGQPENNYKTTPPVLDSDGSFFLYSKLTVDKSRWQQGNVFSCSVMHEALHNHYTQKSLSLSPGK

SEQ ID NO: 1526 - protein, 5 aa, synthetic construct
  REGION 1..5: note = Ab1035 CDR H1
SYSIH

SEQ ID NO: 1527 - protein, 17 aa, synthetic construct
  REGION 1..17: note = Ab1035 CDR H2
SISPYYGSTYYADSVKG

SEQ ID NO: 1528 - protein, 18 aa, synthetic construct
  REGION 1..18: note = Ab1035 CDR H3
AYEWYKYDLYAGSLGFDY

SEQ ID NO: 1529 - protein, 11 aa, synthetic construct
  REGION 1..11: note = Ab1035 CDR L1
RASQSVSSAVA

SEQ ID NO: 1530 - protein, 7 aa, synthetic construct
  REGION 1..7: note = Ab1035 CDR L2
SASSLYS

SEQ ID NO: 1531 - protein, 9 aa, synthetic construct
  REGION 1..9: note = Ab1035 CDR L3
QQGGYSLIT

SEQ ID NO: 1532 - protein, 214 aa, synthetic construct; identical to SEQ ID NO: 857
  REGION 1..214: note = Ab1036 LC

SEQ ID NO: 1533 - protein, 457 aa, synthetic construct
  REGION 1..457: note = Ab1036 HC
EVQLVESGGGLVQPGGSLRLSCAASGFDFSSYSIHWVRQAPGKGLEWVASISPYYGSTYYADSVKGRFTISADTSKNTAYLQMNSLRAEDTAVYYCARYYEWYKYDLYASSLGFDYWGQGTLVTVSSASTKGPSVFPLAPSSKSTSGGTAALGCLVKDYFPEPVTVSWNSGALTSGVHTFPAVLQSSGLYSLSSVVTVPSSSLGTQTYICNVNHKPSNTKVDKKVEPKSCDKTHTCPPCPAPEAAGGPSVFLFPPKPKDTLMISRTPEVTCVVVDVSHEDPEVKFNWYVDGVEVHNAKTKPREEQYNSTYRVVSVLTVLHQDWLNGKEYKCKVSNKALGAPIEKTISKAKGQPREPQVYTLPPSRDELTKNQVSLTCLVKGFYPSDIAVEWESNGQPENNYKTTPPVLDSDGSFFLYSKLTVDKSRWQQGNVFSCSVMHEALHNHYTQKSLSLSPGK

SEQ ID NO: 1534 - protein, 5 aa, synthetic construct
  REGION 1..5: note = Ab1036 CDR H1
SYSIH

SEQ ID NO: 1535 - protein, 17 aa, synthetic construct
  REGION 1..17: note = Ab1036 CDR H2
SISPYYGSTYYADSVKG

SEQ ID NO: 1536 - protein, 18 aa, synthetic construct
  REGION 1..18: note = Ab1036 CDR H3
YYEWYKYDLYASSLGFDY

SEQ ID NO: 1537 - protein, 11 aa, synthetic construct
  REGION 1..11: note = Ab1036 CDR L1
RASQSVSSAVA

SEQ ID NO: 1538 - protein, 7 aa, synthetic construct
  REGION 1..7: note = Ab1036 CDR L2
SASSLYS

SEQ ID NO: 1539 - protein, 9 aa, synthetic construct
  REGION 1..9: note = Ab1036 CDR L3
QQGGYSLIT

SEQ ID NO: 1540 - protein, 214 aa, synthetic construct; identical to SEQ ID NO: 857
  REGION 1..214: note = Ab1037 LC

SEQ ID NO: 1541 - protein, 457 aa, synthetic construct
  REGION 1..457: note = Ab1037 HC
EVQLVESGGGLVQPGGSLRLSCAASGFDFSSYSIHWVRQAPGKGLEWVASISPYYGSTAYADSVKGRFTISADTSKNTAYLQMNSLRAEDTAVYYCARAYEWYKYDLYAGSLGFDYWGQGTLVTVSSASTKGPSVFPLAPSSKSTSGGTAALGCLVKDYFPEPVTVSWNSGALTSGVHTFPAVLQSSGLYSLSSVVTVPSSSLGTQTYICNVNHKPSNTKVDKKVEPKSCDKTHTCPPCPAPEAAGGPSVFLFPPKPKDTLMISRTPEVTCVVVDVSHEDPEVKFNWYVDGVEVHNAKTKPREEQYNSTYRVVSVLTVLHQDWLNGKEYKCKVSNKALGAPIEKTISKAKGQPREPQVYTLPPSRDELTKNQVSLTCLVKGFYPSDIAVEWESNGQPENNYKTTPPVLDSDGSFFLYSKLTVDKSRWQQGNVFSCSVMHEALHNHYTQKSLSLSPGK

SEQ ID NO: 1542 - protein, 5 aa, synthetic construct
  REGION 1..5: note = Ab1037 CDR H1
SYSIH

SEQ ID NO: 1543 - protein, 17 aa, synthetic construct
  REGION 1..17: note = Ab1037 CDR H2
SISPYYGSTAYADSVKG

SEQ ID NO: 1544 - protein, 18 aa, synthetic construct
  REGION 1..18: note = Ab1037 CDR H3
AYEWYKYDLYAGSLGFDY

SEQ ID NO: 1545 - protein, 11 aa, synthetic construct
  REGION 1..11: note = Ab1037 CDR L1
RASQSVSSAVA

SEQ ID NO: 1546 - protein, 7 aa, synthetic construct
  REGION 1..7: note = Ab1037 CDR L2
SASSLYS

SEQ ID NO: 1547 - protein, 9 aa, synthetic construct
  REGION 1..9: note = Ab1037 CDR L3
QQGGYSLIT

SEQ ID NO: 1548 - protein, 214 aa, synthetic construct; identical to SEQ ID NO: 857
  REGION 1..214: note = Ab1038 LC

SEQ ID NO: 1549 - protein, 457 aa, synthetic construct
  REGION 1..457: note = Ab1038 HC
EVQLVESGGGLVQPGGSLRLSCAASGFDFSSYSIHWVRQAPGKGLEWVASISPYYGSTAYADSVKGRFTISADTSKNTAYLQMNSLRAEDTAVYYCARYYEWYKYDLYASSLGFDYWGQGTLVTVSSASTKGPSVFPLAPSSKSTSGGTAALGCLVKDYFPEPVTVSWNSGALTSGVHTFPAVLQSSGLYSLSSVVTVPSSSLGTQTYICNVNHKPSNTKVDKKVEPKSCDKTHTCPPCPAPEAAGGPSVFLFPPKPKDTLMISRTPEVTCVVVDVSHEDPEVKFNWYVDGVEVHNAKTKPREEQYNSTYRVVSVLTVLHQDWLNGKEYKCKVSNKALGAPIEKTISKAKGQPREPQVYTLPPSRDELTKNQVSLTCLVKGFYPSDIAVEWESNGQPENNYKTTPPVLDSDGSFFLYSKLTVDKSRWQQGNVFSCSVMHEALHNHYTQKSLSLSPGK

SEQ ID NO: 1550 - protein, 5 aa, synthetic construct
  REGION 1..5: note = Ab1038 CDR H1
SYSIH

SEQ ID NO: 1551 - protein, 17 aa, synthetic construct
  REGION 1..17: note = Ab1038 CDR H2
SISPYYGSTAYADSVKG

SEQ ID NO: 1552 - protein, 18 aa, synthetic construct
  REGION 1..18: note = Ab1038 CDR H3
YYEWYKYDLYASSLGFDY

SEQ ID NO: 1553 - protein, 11 aa, synthetic construct
  REGION 1..11: note = Ab1038 CDR L1
RASQSVSSAVA

SEQ ID NO: 1554 - protein, 7 aa, synthetic construct
  REGION 1..7: note = Ab1038 CDR L2
SASSLYS

SEQ ID NO: 1555 - protein, 9 aa, synthetic construct
  REGION 1..9: note = Ab1038 CDR L3
QQGGYSLIT

SEQ ID NO: 1556 - protein, 214 aa, synthetic construct; identical to SEQ ID NO: 857
  REGION 1..214: note = Ab1039 LC

SEQ ID NO: 1557 - protein, 457 aa, synthetic construct
  REGION 1..457: note = Ab1039 HC
EVQLVESGGGLVQPGGSLRLSCAASGFDFSSYSIHWVRQAPGKGLEWVASISPYYGSTYYADSVKGRFTISADTSKNTAYLQMNSLRAEDTAVYYCARAYEWYKYDLYASSLGFDYWGQGTLVTVSSASTKGPSVFPLAPSSKSTSGGTAALGCLVKDYFPEPVTVSWNSGALTSGVHTFPAVLQSSGLYSLSSVVTVPSSSLGTQTYICNVNHKPSNTKVDKKVEPKSCDKTHTCPPCPAPEAAGGPSVFLFPPKPKDTLMISRTPEVTCVVVDVSHEDPEVKFNWYVDGVEVHNAKTKPREEQYNSTYRVVSVLTVLHQDWLNGKEYKCKVSNKALGAPIEKTISKAKGQPREPQVYTLPPSRDELTKNQVSLTCLVKGFYPSDIAVEWESNGQPENNYKTTPPVLDSDGSFFLYSKLTVDKSRWQQGNVFSCSVMHEALHNHYTQKSLSLSPGK

SEQ ID NO: 1558 - protein, 5 aa, synthetic construct
  REGION 1..5: note = Ab1039 CDR H1
SYSIH

SEQ ID NO: 1559 - protein, 17 aa, synthetic construct
  REGION 1..17: note = Ab1039 CDR H2
SISPYYGSTYYADSVKG

SEQ ID NO: 1560 - protein, 18 aa, synthetic construct
  REGION 1..18: note = Ab1039 CDR H3
AYEWYKYDLYASSLGFDY

SEQ ID NO: 1561 - protein, 11 aa, synthetic construct
  REGION 1..11: note = Ab1039 CDR L1
RASQSVSSAVA

SEQ ID NO: 1562 - protein, 7 aa, synthetic construct
  REGION 1..7: note = Ab1039 CDR L2
SASSLYS

SEQ ID NO: 1563 - protein, 9 aa, synthetic construct
  REGION 1..9: note = Ab1039 CDR L3
QQGGYSLIT

SEQ ID NO: 1564 - protein, 214 aa, synthetic construct; identical to SEQ ID NO: 857
  REGION 1..214: note = Ab1040 LC

SEQ ID NO: 1565 - protein, 457 aa, synthetic construct
  REGION 1..457: note = Ab1040 HC
EVQLVESGGGLVQPGGSLRLSCAASGFDFSSYSIHWVRQAPGKGLEWVASISPYYGSTAYADSVKGRFTISADTSKNTAYLQMNSLRAEDTAVYYCARAYEWYKYDLYASSLGFDYWGQGTLVTVSSASTKGPSVFPLAPSSKSTSGGTAALGCLVKDYFPEPVTVSWNSGALTSGVHTFPAVLQSSGLYSLSSVVTVPSSSLGTQTYICNVNHKPSNTKVDKKVEPKSCDKTHTCPPCPAPEAAGGPSVFLFPPKPKDTLMISRTPEVTCVVVDVSHEDPEVKFNWYVDGVEVHNAKTKPREEQYNSTYRVVSVLTVLHQDWLNGKEYKCKVSNKALGAPIEKTISKAKGQPREPQVYTLPPSRDELTKNQVSLTCLVKGFYPSDIAVEWESNGQPENNYKTTPPVLDSDGSFFLYSKLTVDKSRWQQGNVFSCSVMHEALHNHYTQKSLSLSPGK

SEQ ID NO: 1566 - protein, 5 aa, synthetic construct
  REGION 1..5: note = Ab1040 CDR H1
SYSIH

SEQ ID NO: 1567 - protein, 17 aa, synthetic construct
  REGION 1..17: note = Ab1040 CDR H2
SISPYYGSTAYADSVKG

SEQ ID NO: 1568 - protein, 18 aa, synthetic construct
  REGION 1..18: note = Ab1040 CDR H3
AYEWYKYDLYASSLGFDY

SEQ ID NO: 1569 - protein, 11 aa, synthetic construct
  REGION 1..11: note = Ab1040 CDR L1
RASQSVSSAVA

SEQ ID NO: 1570 - protein, 7 aa, synthetic construct
  REGION 1..7: note = Ab1040 CDR L2
SASSLYS

SEQ ID NO: 1571 - protein, 9 aa, synthetic construct
  REGION 1..9: note = Ab1040 CDR L3
QQGGYSLIT

SEQ ID NO: 1572 - protein, 214 aa, synthetic construct; identical to SEQ ID NO: 857
  REGION 1..214: note = Ab1041 LC

SEQ ID NO: 1573 - protein, 457 aa, synthetic construct
  REGION 1..457: note = Ab1041 HC
EVQLVESGGGLVQPGGSLRLSCAASGFDFSSYSIHWVRQAPGKGLEWVASISPHYGSTAYADSVKGRFTISADTSKNTAYLQMNSLRAEDTAVYYCARAYEWYKYDLYASSLGFDYWGQGTLVTVSSASTKGPSVFPLAPSSKSTSGGTAALGCLVKDYFPEPVTVSWNSGALTSGVHTFPAVLQSSGLYSLSSVVTVPSSSLGTQTYICNVNHKPSNTKVDKKVEPKSCDKTHTCPPCPAPEAAGGPSVFLFPPKPKDTLMISRTPEVTCVVVDVSHEDPEVKFNWYVDGVEVHNAKTKPREEQYNSTYRVVSVLTVLHQDWLNGKEYKCKVSNKALGAPIEKTISKAKGQPREPQVYTLPPSRDELTKNQVSLTCLVKGFYPSDIAVEWESNGQPENNYKTTPPVLDSDGSFFLYSKLTVDKSRWQQGNVFSCSVMHEALHNHYTQKSLSLSPGK

SEQ ID NO: 1574 - protein, 5 aa, synthetic construct
  REGION 1..5: note = AB1041 CDR H1
SYSIH

SEQ ID NO: 1575 - protein, 17 aa, synthetic construct
  REGION 1..17: note = Ab1041 CDR H2
SISPHYGSTAYADSVKG

SEQ ID NO: 1576 - protein, 18 aa, synthetic construct
  REGION 1..18: note = Ab1041 CDR H3
AYEWYKYDLYASSLGFDY

SEQ ID NO: 1577 - protein, 11 aa, synthetic construct
  REGION 1..11: note = Ab1041 CDR L1
RASQSVSSAVA

SEQ ID NO: 1578 - protein, 7 aa, synthetic construct
  REGION 1..7: note = Ab1041 CDR L2
SASSLYS

SEQ ID NO: 1579 - protein, 9 aa, synthetic construct
  REGION 1..9: note = Ab1041 CDR L3
QQGGYSLIT

SEQ ID NO: 1580 - protein, 214 aa, synthetic construct; identical to SEQ ID NO: 857
  REGION 1..214: note = Ab1042 LC

SEQ ID NO: 1581 - protein, 457 aa, synthetic construct
  REGION 1..457: note = Ab1042 HC
EVQLVESGGGLVQPGGSLRLSCAASGFDFSSYSIHWVRQAPGKGLEWVASISPHYGSTYYADSVKGRFTISADTSKNTAYLQMNSLRAEDTAVYYCARAYEWYKYDLYASSLGFDYWGQGTLVTVSSASTKGPSVFPLAPSSKSTSGGTAALGCLVKDYFPEPVTVSWNSGALTSGVHTFPAVLQSSGLYSLSSVVTVPSSSLGTQTYICNVNHKPSNTKVDKKVEPKSCDKTHTCPPCPAPEAAGGPSVFLFPPKPKDTLMISRTPEVTCVVVDVSHEDPEVKFNWYVDGVEVHNAKTKPREEQYNSTYRVVSVLTVLHQDWLNGKEYKCKVSNKALGAPIEKTISKAKGQPREPQVYTLPPSRDELTKNQVSLTCLVKGFYPSDIAVEWESNGQPENNYKTTPPVLDSDGSFFLYSKLTVDKSRWQQGNVFSCSVMHEALHNHYTQKSLSLSPGK

SEQ ID NO: 1582 - protein, 5 aa, synthetic construct
  REGION 1..5: note = Ab1042 CDR H1
SYSIH

SEQ ID NO: 1583 - protein, 17 aa, synthetic construct
  REGION 1..17: note = Ab1042 CDR H2
SISPHYGSTYYADSVKG

SEQ ID NO: 1584 - protein, 18 aa, synthetic construct
  REGION 1..18: note = Ab1042 CDR H3
AYEWYKYDLYASSLGFDY

SEQ ID NO: 1585 - protein, 11 aa, synthetic construct
  REGION 1..11: note = Ab1042 CDR L1
RASQSVSSAVA

SEQ ID NO: 1586 - protein, 7 aa, synthetic construct
  REGION 1..7: note = Ab1042 CDR L2
SASSLYS

SEQ ID NO: 1587 - protein, 9 aa, synthetic construct
  REGION 1..9: note = Ab1042 CDR L3
QQGGYSLIT

SEQ ID NO: 1588 - protein, 214 aa, synthetic construct; identical to SEQ ID NO: 857
  REGION 1..214: note = Ab1043 LC

SEQ ID NO: 1589 - protein, 457 aa, synthetic construct
  REGION 1..457: note = Ab1043 HC
EVQLVESGGGLVQPGGSLRLSCAASGFDFSSYSIHWVRQAPGKGLEWVASISPHYGSTAYADSVKGRFTISADTSKNTAYLQMNSLRAEDTAVYYCARYYEWYKYDLYASSLGFDYWGQGTLVTVSSASTKGPSVFPLAPSSKSTSGGTAALGCLVKDYFPEPVTVSWNSGALTSGVHTFPAVLQSSGLYSLSSVVTVPSSSLGTQTYICNVNHKPSNTKVDKKVEPKSCDKTHTCPPCPAPEAAGGPSVFLFPPKPKDTLMISRTPEVTCVVVDVSHEDPEVKFNWYVDGVEVHNAKTKPREEQYNSTYRVVSVLTVLHQDWLNGKEYKCKVSNKALGAPIEKTISKAKGQPREPQVYTLPPSRDELTKNQVSLTCLVKGFYPSDIAVEWESNGQPENNYKTTPPVLDSDGSFFLYSKLTVDKSRWQQGNVFSCSVMHEALHNHYTQKSLSLSPGK

SEQ ID NO: 1590 - protein, 5 aa, synthetic construct
  REGION 1..5: note = Ab1043 CDR H1
SYSIH

SEQ ID NO: 1591 - protein, 17 aa, synthetic construct
  REGION 1..17: note = Ab1043 CDR H2
SISPHYGSTAYADSVKG

SEQ ID NO: 1592 - protein, 18 aa, synthetic construct
  REGION 1..18: note = Ab1043 CDR H3
YYEWYKYDLYASSLGFDY

SEQ ID NO: 1593 - protein, 11 aa, synthetic construct
  REGION 1..11: note = Ab1043 CDR L1
RASQSVSSAVA

SEQ ID NO: 1594 - protein, 7 aa, synthetic construct
  REGION 1..7: note = Ab1043 CDR l2
SASSLYS

SEQ ID NO: 1595 - protein, 9 aa, synthetic construct
  REGION 1..9: note = Ab1043 CDR L3
QQGGYSLIT

SEQ ID NO: 1596 - protein, 457 aa, synthetic construct
  REGION 1..457: note = Ab1044 HC
EVQLVESGGGLVQPGGSLRLSCAASGFDFSSYSIHWVRQAPGKGLEWVAAISPYYGSTYYADSVKGRFTISADTSKNTAYLQMNSLRAEDTAVYYCARYYEWYKYDLYAGSLGFDYWGQGTLVTVSSASTKGPSVFPLAPSSKSTSGGTAALGCLVKDYFPEPVTVSWNSGALTSGVHTFPAVLQSSGLYSLSSVVTVPSSSLGTQTYICNVNHKPSNTKVDKKVEPKSCDKTHTCPPCPAPEAAGGPSVFLFPPKPKDTLMISRTPEVTCVVVDVSHEDPEVKFNWYVDGVEVHNAKTKPREEQYNSTYRVVSVLTVLHQDWLNGKEYKCKVSNKALGAPIEKTISKAKGQPREPQVYTLPPSRDELTKNQVSLTCLVKGFYPSDIAVEWESNGQPENNYKTTPPVLDSDGSFFLYSKLTVDKSRWQQGNVFSCSVMHEALHNHYTQKSLSLSPGK

SEQ ID NO: 1597 - protein, 5 aa, synthetic construct
  REGION 1..5: note = Ab1044 CDR H1
SYSIH

SEQ ID NO: 1598 - protein, 17 aa, synthetic construct
  REGION 1..17: note = Ab1044 CDR H2
AISPYYGSTYYADSVKG

SEQ ID NO: 1599 - protein, 18 aa, synthetic construct
  REGION 1..18: note = Ab1044 CDR H3
YYEWYKYDLYAGSLGFDY

SEQ ID NO: 1600 - protein, 457 aa, synthetic construct
  REGION 1..457: note = Ab1045 HC
EVQLVESGGGLVQPGGSLRLSCAASGFDFSSYSIHWVRQAPGKGLEWVAAISPYYGSTYYADSVKGRFTISADTSKNTAYLQMNSLRAEDTAVYYCARYYEYYKYDLYAGSLGFDYWGQGTLVTVSSASTKGPSVFPLAPSSKSTSGGTAALGCLVKDYFPEPVTVSWNSGALTSGVHTFPAVLQSSGLYSLSSVVTVPSSSLGTQTYICNVNHKPSNTKVDKKVEPKSCDKTHTCPPCPAPEAAGGPSVFLFPPKPKDTLMISRTPEVTCVVVDVSHEDPEVKFNWYVDGVEVHNAKTKPREEQYNSTYRVVSVLTVLHQDWLNGKEYKCKVSNKALGAPIEKTISKAKGQPREPQVYTLPPSRDELTKNQVSLTCLVKGFYPSDIAVEWESNGQPENNYKTTPPVLDSDGSFFLYSKLTVDKSRWQQGNVFSCSVMHEALHNHYTQKSLSLSPGK

SEQ ID NO: 1601 - protein, 5 aa, synthetic construct
  REGION 1..5: note = Ab1045 CDR H1
SYSIH

SEQ ID NO: 1602 - protein, 17 aa, synthetic construct
  REGION 1..17: note = Ab1045 CDR H2
AISPYYGSTYYADSVKG

SEQ ID NO: 1603 - protein, 18 aa, synthetic construct
  REGION 1..18: note = Ab1045 CDR H3
YYEYYKYDLYAGSLGFDY

SEQ ID NO: 1604 - protein, 457 aa, synthetic construct
  REGION 1..457: note = Ab1046 HC
EVQLVESGGGLVQPGGSLRLSCAASGFDFSSYSIHWVRQAPGKGLEWVAAISPYYGSTAYADSVKGRFTISADTSKNTAYLQMNSLRAEDTAVYYCARAYEWYKYDLYASSLGFDYWGQGTLVTVSSASTKGPSVFPLAPSSKSTSGGTAALGCLVKDYFPEPVTVSWNSGALTSGVHTFPAVLQSSGLYSLSSVVTVPSSSLGTQTYICNVNHKPSNTKVDKKVEPKSCDKTHTCPPCPAPEAAGGPSVFLFPPKPKDTLMISRTPEVTCVVVDVSHEDPEVKFNWYVDGVEVHNAKTKPREEQYNSTYRVVSVLTVLHQDWLNGKEYKCKVSNKALGAPIEKTISKAKGQPREPQVYTLPPSRDELTKNQVSLTCLVKGFYPSDIAVEWESNGQPENNYKTTPPVLDSDGSFFLYSKLTVDKSRWQQGNVFSCSVMHEALHNHYTQKSLSLSPGK

SEQ ID NO: 1605 - protein, 5 aa, synthetic construct
  REGION 1..5: note = Ab1046 CDR H1
SYSIH

SEQ ID NO: 1606 - protein, 17 aa, synthetic construct
  REGION 1..17: note = Ab1046 CDR H2
AISPYYGSTAYADSVKG

SEQ ID NO: 1607 - protein, 18 aa, synthetic construct
  REGION 1..18: note = Ab1046 CDR H3
AYEWYKYDLYASSLGFDY

SEQ ID NO: 1608 - protein, 457 aa, synthetic construct
  REGION 1..457: note = Ab1047 HC
EVQLVESGGGLVQPGGSLRLSCAASGFDFSSYSIHWVRQAPGKGLEWVAAISPYYGSTAYADSVKGRFTISADTSKNTAYLQMNSLRAEDTAVYYCARAYEWYKYDLYAGSLGFDYWGQGTLVTVSSASTKGPSVFPLAPSSKSTSGGTAALGCLVKDYFPEPVTVSWNSGALTSGVHTFPAVLQSSGLYSLSSVVTVPSSSLGTQTYICNVNHKPSNTKVDKKVEPKSCDKTHTCPPCPAPEAAGGPSVFLFPPKPKDTLMISRTPEVTCVVVDVSHEDPEVKFNWYVDGVEVHNAKTKPREEQYNSTYRVVSVLTVLHQDWLNGKEYKCKVSNKALGAPIEKTISKAKGQPREPQVYTLPPSRDELTKNQVSLTCLVKGFYPSDIAVEWESNGQPENNYKTTPPVLDSDGSFFLYSKLTVDKSRWQQGNVFSCSVMHEALHNHYTQKSLSLSPGK

SEQ ID NO: 1609 - protein, 5 aa, synthetic construct
  REGION 1..5: note = Ab1047 CDR H1
SYSIH

SEQ ID NO: 1610 - protein, 17 aa, synthetic construct
  REGION 1..17: note = Ab1047 CDR H2
AISPYYGSTAYADSVKG

SEQ ID NO: 1611 - protein, 18 aa, synthetic construct
  REGION 1..18: note = Ab1047 CDR H3
AYEWYKYDLYAGSLGFDY

SEQ ID NO: 1612 - protein, 457 aa, synthetic construct
  REGION 1..457: note = Ab1048 HC
EVQLVESGGGLVQPGGSLRLSCAASGFDFSSYSIHWVRQAPGKGLEWVAAISPYYGSTYYADSVKGRFTISADTSKNTAYLQMNSLRAEDTAVYYCARAYEWYKYDLYASSLGFDYWGQGTLVTVSSASTKGPSVFPLAPSSKSTSGGTAALGCLVKDYFPEPVTVSWNSGALTSGVHTFPAVLQSSGLYSLSSVVTVPSSSLGTQTYICNVNHKPSNTKVDKKVEPKSCDKTHTCPPCPAPEAAGGPSVFLFPPKPKDTLMISRTPEVTCVVVDVSHEDPEVKFNWYVDGVEVHNAKTKPREEQYNSTYRVVSVLTVLHQDWLNGKEYKCKVSNKALGAPIEKTISKAKGQPREPQVYTLPPSRDELTKNQVSLTCLVKGFYPSDIAVEWESNGQPENNYKTTPPVLDSDGSFFLYSKLTVDKSRWQQGNVFSCSVMHEALHNHYTQKSLSLSPGK

SEQ ID NO: 1613 - protein, 5 aa, synthetic construct
  REGION 1..5: note = Ab1048 CDR H1
SYSIH

SEQ ID NO: 1614 - protein, 17 aa, synthetic construct
  REGION 1..17: note = Ab1048 CDR H2
AISPYYGSTYYADSVKG

SEQ ID NO: 1615 - protein, 18 aa, synthetic construct
  REGION 1..18: note = Ab1048 CDR H3
AYEWYKYDLYASSLGFDY

SEQ ID NO: 1616 - protein, 457 aa, synthetic construct
  REGION 1..457: note = Ab1049 HC
EVQLVESGGGLVQPGGSLRLSCAASGFDFSSYSIHWVRQAPGKGLEWVAAISPYYGSTAYADSVKGRFTISADTSKNTAYLQMNSLRAEDTAVYYCARYYEWYKYDLYASSLGFDYWGQGTLVTVSSASTKGPSVFPLAPSSKSTSGGTAALGCLVKDYFPEPVTVSWNSGALTSGVHTFPAVLQSSGLYSLSSVVTVPSSSLGTQTYICNVNHKPSNTKVDKKVEPKSCDKTHTCPPCPAPEAAGGPSVFLFPPKPKDTLMISRTPEVTCVVVDVSHEDPEVKFNWYVDGVEVHNAKTKPREEQYNSTYRVVSVLTVLHQDWLNGKEYKCKVSNKALGAPIEKTISKAKGQPREPQVYTLPPSRDELTKNQVSLTCLVKGFYPSDIAVEWESNGQPENNYKTTPPVLDSDGSFFLYSKLTVDKSRWQQGNVFSCSVMHEALHNHYTQKSLSLSPGK

SEQ ID NO: 1617 - protein, 5 aa, synthetic construct
  REGION 1..5: note = Ab1049 CDR H1
SYSIH

SEQ ID NO: 1618 - protein, 17 aa, synthetic construct
  REGION 1..17: note = Ab1049 CDR H2
AISPYYGSTAYADSVKG

SEQ ID NO: 1619 - protein, 18 aa, synthetic construct
  REGION 1..18: note = Ab1049 CDR H3
YYEWYKYDLYASSLGFDY

SEQ ID NO: 1620 - protein, 457 aa, synthetic construct
  REGION 1..457: note = Ab1050 HC
EVQLVESGGGLVQPGGSLRLSCAASGFDFSSYSIHWVRQAPGKGLEWVAAISPYYGSTAYADSVKGRFTISADTSKNTAYLQMNSLRAEDTAVYYCARAYEYYKYDLYASSLGFDYWGQGTLVTVSSASTKGPSVFPLAPSSKSTSGGTAALGCLVKDYFPEPVTVSWNSGALTSGVHTFPAVLQSSGLYSLSSVVTVPSSSLGTQTYICNVNHKPSNTKVDKKVEPKSCDKTHTCPPCPAPEAAGGPSVFLFPPKPKDTLMISRTPEVTCVVVDVSHEDPEVKFNWYVDGVEVHNAKTKPREEQYNSTYRVVSVLTVLHQDWLNGKEYKCKVSNKALGAPIEKTISKAKGQPREPQVYTLPPSRDELTKNQVSLTCLVKGFYPSDIAVEWESNGQPENNYKTTPPVLDSDGSFFLYSKLTVDKSRWQQGNVFSCSVMHEALHNHYTQKSLSLSPGK

SEQ ID NO: 1621 - protein, 5 aa, synthetic construct
  REGION 1..5: note = Ab1050 CDR H1
SYSIH

SEQ ID NO: 1622 - protein, 17 aa, synthetic construct
  REGION 1..17: note = Ab1050 CDR H2
AISPYYGSTAYADSVKG

SEQ ID NO: 1623 - protein, 18 aa, synthetic construct
  REGION 1..18: note = Ab1050 CDR H3
AYEYYKYDLYASSLGFDY

SEQ ID NO: 1624 - protein, 457 aa, synthetic construct
  REGION 1..457: note = Ab1051 HC
EVQLVESGGGLVQPGGSLRLSCAASGFDFSSYSIHWVRQAPGKGLEWVAAISPHYGSTYYADSVKGRFTISADTSKNTAYLQMNSLRAEDTAVYYCARYYEWYKYDLYAGSLGFDYWGQGTLVTVSSASTKGPSVFPLAPSSKSTSGGTAALGCLVKDYFPEPVTVSWNSGALTSGVHTFPAVLQSSGLYSLSSVVTVPSSSLGTQTYICNVNHKPSNTKVDKKVEPKSCDKTHTCPPCPAPEAAGGPSVFLFPPKPKDTLMISRTPEVTCVVVDVSHEDPEVKFNWYVDGVEVHNAKTKPREEQYNSTYRVVSVLTVLHQDWLNGKEYKCKVSNKALGAPIEKTISKAKGQPREPQVYTLPPSRDELTKNQVSLTCLVKGFYPSDIAVEWESNGQPENNYKTTPPVLDSDGSFFLYSKLTVDKSRWQQGNVFSCSVMHEALHNHYTQKSLSLSPGK

SEQ ID NO: 1625 - protein, 5 aa, synthetic construct
  REGION 1..5: note = Ab1051 CDR H1
SYSIH

SEQ ID NO: 1626 - protein, 17 aa, synthetic construct
  REGION 1..17: note = Ab1051 CDR H2
AISPHYGSTYYADSVKG

SEQ ID NO: 1627 - protein, 18 aa, synthetic construct
  REGION 1..18: note = Ab1051 CDR H3
YYEWYKYDLYAGSLGFDY

SEQ ID NO: 1628 - protein, 457 aa, synthetic construct
  REGION 1..457: note = Ab1052 HC
EVQLVESGGGLVQPGGSLRLSCAASGFDFSSYSIHWVRQAPGKGLEWVAAISPHYGSTAYADSVKGRFTISADTSKNTAYLQMNSLRAEDTAVYYCARAYEWYKYDLYASSLGFDYWGQGTLVTVSSASTKGPSVFPLAPSSKSTSGGTAALGCLVKDYFPEPVTVSWNSGALTSGVHTFPAVLQSSGLYSLSSVVTVPSSSLGTQTYICNVNHKPSNTKVDKKVEPKSCDKTHTCPPCPAPEAAGGPSVFLFPPKPKDTLMISRTPEVTCVVVDVSHEDPEVKFNWYVDGVEVHNAKTKPREEQYNSTYRVVSVLTVLHQDWLNGKEYKCKVSNKALGAPIEKTISKAKGQPREPQVYTLPPSRDELTKNQVSLTCLVKGFYPSDIAVEWESNGQPENNYKTTPPVLDSDGSFFLYSKLTVDKSRWQQGNVFSCSVMHEALHNHYTQKSLSLSPGK

SEQ ID NO: 1629 - protein, 5 aa, synthetic construct
  REGION 1..5: note = Ab1052 CDR H1
SYSIH

SEQ ID NO: 1630 - protein, 17 aa, synthetic construct
  REGION 1..17: note = Ab1052 CDR H2
AISPHYGSTAYADSVKG

SEQ ID NO: 1631 - protein, 18 aa, synthetic construct
  REGION 1..18: note = Ab1052 CDR H3
AYEWYKYDLYASSLGFDY

SEQ ID NO: 1632 - protein, 457 aa, synthetic construct
  REGION 1..457: note = Ab1053 HC
EVQLVESGGGLVQPGGSLRLSCAASGFDFSSYSIHWVRQAPGKGLEWVAAISPHYGSTAYADSVKGRFTISADTSKNTAYLQMNSLRAEDTAVYYCARAYEWYKYDLYAGSLGFDYWGQGTLVTVSSASTKGPSVFPLAPSSKSTSGGTAALGCLVKDYFPEPVTVSWNSGALTSGVHTFPAVLQSSGLYSLSSVVTVPSSSLGTQTYICNVNHKPSNTKVDKKVEPKSCDKTHTCPPCPAPEAAGGPSVFLFPPKPKDTLMISRTPEVTCVVVDVSHEDPEVKFNWYVDGVEVHNAKTKPREEQYNSTYRVVSVLTVLHQDWLNGKEYKCKVSNKALGAPIEKTISKAKGQPREPQVYTLPPSRDELTKNQVSLTCLVKGFYPSDIAVEWESNGQPENNYKTTPPVLDSDGSFFLYSKLTVDKSRWQQGNVFSCSVMHEALHNHYTQKSLSLSPGK

SEQ ID NO: 1633 - protein, 5 aa, synthetic construct
  REGION 1..5: note = Ab1053 CDR H1
SYSIH

SEQ ID NO: 1634 - protein, 17 aa, synthetic construct
  REGION 1..17: note = Ab1053 CDR H2
AISPHYGSTAYADSVKG

SEQ ID NO: 1635 - protein, 18 aa, synthetic construct
  REGION 1..18: note = Ab1053 CDR H3
AYEWYKYDLYAGSLGFDY

SEQ ID NO: 1636 - protein, 457 aa, synthetic construct
  REGION 1..457: note = Ab1054 HC
EVQLVESGGGLVQPGGSLRLSCAASGFDFSSYSIHWVRQAPGKGLEWVAAISPHYGSTYYADSVKGRFTISADTSKNTAYLQMNSLRAEDTAVYYCARAYEWYKYDLYASSLGFDYWGQGTLVTVSSASTKGPSVFPLAPSSKSTSGGTAALGCLVKDYFPEPVTVSWNSGALTSGVHTFPAVLQSSGLYSLSSVVTVPSSSLGTQTYICNVNHKPSNTKVDKKVEPKSCDKTHTCPPCPAPEAAGGPSVFLFPPKPKDTLMISRTPEVTCVVVDVSHEDPEVKFNWYVDGVEVHNAKTKPREEQYNSTYRVVSVLTVLHQDWLNGKEYKCKVSNKALGAPIEKTISKAKGQPREPQVYTLPPSRDELTKNQVSLTCLVKGFYPSDIAVEWESNGQPENNYKTTPPVLDSDGSFFLYSKLTVDKSRWQQGNVFSCSVMHEALHNHYTQKSLSLSPGK

SEQ ID NO: 1637 - protein, 5 aa, synthetic construct
  REGION 1..5: note = Ab1054 CDR H1
SYSIH

SEQ ID NO: 1638 - protein, 17 aa, synthetic construct
  REGION 1..17: note = Ab1054 CDR H2
AISPHYGSTYYADSVKG

SEQ ID NO: 1639 - protein, 18 aa, synthetic construct
  REGION 1..18: note = Ab1054 CDR H3
AYEWYKYDLYASSLGFDY

SEQ ID NO: 1640 - protein, 457 aa, synthetic construct
  REGION 1..457: note = Ab1055 HC
EVQLVESGGGLVQPGGSLRLSCAASGFDFSSYSIHWVRQAPGKGLEWVAAISPHYGSTAYADSVKGRFTISADTSKNTAYLQMNSLRAEDTAVYYCARYYEWYKYDLYASSLGFDYWGQGTLVTVSSASTKGPSVFPLAPSSKSTSGGTAALGCLVKDYFPEPVTVSWNSGALTSGVHTFPAVLQSSGLYSLSSVVTVPSSSLGTQTYICNVNHKPSNTKVDKKVEPKSCDKTHTCPPCPAPEAAGGPSVFLFPPKPKDTLMISRTPEVTCVVVDVSHEDPEVKFNWYVDGVEVHNAKTKPREEQYNSTYRVVSVLTVLHQDWLNGKEYKCKVSNKALGAPIEKTISKAKGQPREPQVYTLPPSRDELTKNQVSLTCLVKGFYPSDIAVEWESNGQPENNYKTTPPVLDSDGSFFLYSKLTVDKSRWQQGNVFSCSVMHEALHNHYTQKSLSLSPGK

SEQ ID NO: 1641 - protein, 5 aa, synthetic construct
  REGION 1..5: note = Ab1055 CDR H1
SYSIH

SEQ ID NO: 1642 - protein, 17 aa, synthetic construct
  REGION 1..17: note = Ab1055 CDR H2
AISPHYGSTAYADSVKG

SEQ ID NO: 1643 - protein, 18 aa, synthetic construct
  REGION 1..18: note = Ab1055 CDR H3
YYEWYKYDLYASSLGFDY

SEQ ID NO: 1644 - protein, 214 aa, synthetic construct; identical to SEQ ID NO: 857
  REGION 1..214: note = LC sequence

SEQ ID NO: 1645 - protein, 11 aa, synthetic construct
  REGION 1..11: note = CDR L1
RASQSVSSAVA

SEQ ID NO: 1646 - protein, 7 aa, synthetic construct
  REGION 1..7: note = CDR L2
SASSLYS

SEQ ID NO: 1647 - protein, 9 aa, synthetic construct
  REGION 1..9: note = CDR L3
QQGGYSLIT

SEQ ID NO: 1648 - protein, 481 aa, synthetic construct
  REGION 1..481: note = Ab0486 HC Hole scFv-Fc
EVQLVESGGGLVQPGGSLRLSCAASGFTFNTYAMNWVRQAPGKGLEWVARIRSKYNNYATYYADSVKGRFTISRDDSKSILYLQMNSLKTEDTAVYYCVRHGNFGNSYVSWFAYWGQGTLVTVSSGGGGSGGGGSGGGGSQAVVTQEPSLTVSPGGTVTLTCASSTGAVTTSNYANWVQEKPGQAFRGLIGGTNKRAPWVPARFSGSLIGDKAALTLSGVQPEDEAEYFCALWYSNLWVFGGGTKLTVLGGGGSDKTHTCPPCPAPEAAGGPSVFLFPPKPKDTLMISRTPEVTCVVVDVSHEDPEVKFNWYVDGVEVHNAKTKPREEQYNSTYRVVSVLTVLHQDWLNGKEYKCKVSNKALGAPIEKTISKAKGQPREPQVYTLPPIRELMTSNQVSLSCAVKGFYPSDIAVEWESNGQPENNYKTTPPVLDSDGSFFLVSKLTVDKSRWQQGNVFSCSVMHEALHNHYTQKSLSLSPGK

SEQ ID NO: 1649 - protein, 238 aa, synthetic construct; identical to SEQ ID NO: 52
  REGION 1..238: note = Ab0486 HC Knob Fc-6xHis

SEQ ID NO: 1650 - protein, 5 aa, synthetic construct
  REGION 1..5: note = Ab0486 CDR H1
TYAMN

SEQ ID NO: 1651 - protein, 19 aa, synthetic construct
  REGION 1..19: note = Ab0486 CDR H2
RIRSKYNNYATYYADSVKG

SEQ ID NO: 1652 - protein, 14 aa, synthetic construct
  REGION 1..14: note = Ab0486 CDR H3
HGNFGNSYVSWFAY

SEQ ID NO: 1653 - protein, 14 aa, synthetic construct
  REGION 1..14: note = Ab0486 CDR L1
ASSTGAVTTSNYAN

SEQ ID NO: 1654 - protein, 7 aa, synthetic construct
  REGION 1..7: note = Ab0486 CDR L2
GTNKRAP

SEQ ID NO: 1655 - protein, 9 aa, synthetic construct
  REGION 1..9: note = Ab0486 CDR L3
ALWYSNLWV

SEQ ID NO: 1656 - protein, 482 aa, synthetic construct
  REGION 1..482: note = Ab0487 HC Hole scFv-Fc
EVQLVESGGGLVQPGGSLRLSCAASGFTFNTYAMNWVRQAPGKGLEWVARIRSKYNNYATYYADSVKGRFTISRDDSKSILYLQMNSLKTEDTAVYYCVRHGNFGNSYVSWFAYWGQGTLVTVSSGGGGSGGGGSGGGGSEIVVTQSPATLSLSPGERATLSCRSSTGAVTTSNYANWVQQKPGQAFRGLIGGTNKRATGIPARFSGSLSGTDFTLTISSLEPEDFAVYYCALWYSNLWVFGQGTKLEIKGGGGSDKTHTCPPCPAPEAAGGPSVFLFPPKPKDTLMISRTPEVTCVVVDVSHEDPEVKFNWYVDGVEVHNAKTKPREEQYNSTYRVVSVLTVLHQDWLNGKEYKCKVSNKALGAPIEKTISKAKGQPREPQVYTLPPIRELMTSNQVSLSCAVKGFYPSDIAVEWESNGQPENNYKTTPPVLDSDGSFFLVSKLTVDKSRWQQGNVFSCSVMHEALHNHYTQKSLSLSPGK

SEQ ID NO: 1657 - protein, 238 aa, synthetic construct; identical to SEQ ID NO: 52
  REGION 1..238: note = Ac0487 HC Knob Fc-6xHis

SEQ ID NO: 1658 - protein, 5 aa, synthetic construct
  REGION 1..5: note = Ab0487 CDR H1
TYAMN

SEQ ID NO: 1659 - protein, 19 aa, synthetic construct
  REGION 1..19: note = Ab0487 CDR H2
RIRSKYNNYATYYADSVKG

SEQ ID NO: 1660 - protein, 14 aa, synthetic construct
  REGION 1..14: note = Ab0487 CDR H3
HGNFGNSYVSWFAY

SEQ ID NO: 1661 - protein, 14 aa, synthetic construct
  REGION 1..14: note = Ab0487 CDR L1
RSSTGAVTTSNYAN

SEQ ID NO: 1662 - protein, 7 aa, synthetic construct
  REGION 1..7: note = Ab0487 CDR L2
GTNKRAT

SEQ ID NO: 1663 - protein, 9 aa, synthetic construct
  REGION 1..9: note = Ab0487 CDR L3
ALWYSNLWV

SEQ ID NO: 1664 - protein, 481 aa, synthetic construct
  REGION 1..481: note = Ab0488 HC Hole scFv-Fc
EVQLVESGGGLVQPGGSLRLSCAASGFTFNTYAMDWVRQAPGKGLEWVARIRSKYNNYATYYADSVKGRFTISRDDSKNSLYLQMNSLKTEDTAVYYCVRHGNFGNSYVSWFAYWGQGTLVTVSSGGGGSGGGGSGGGGSQAAVTQPPSASGSPGQSVTISCTSSTGAVTTSNYANWVQQHPGKAFKGMIGGTNKRASGVPDRFSGSLSGDTASLTVSGLQAEDEADYYCALWYSNLWVFGGGTKLTVLGGGGSDKTHTCPPCPAPEAAGGPSVFLFPPKPKDTLMISRTPEVTCVVVDVSHEDPEVKFNWYVDGVEVHNAKTKPREEQYNSTYRVVSVLTVLHQDWLNGKEYKCKVSNKALGAPIEKTISKAKGQPREPQVYTLPPIRELMTSNQVSLSCAVKGFYPSDIAVEWESNGQPENNYKTTPPVLDSDGSFFLVSKLTVDKSRWQQGNVFSCSVMHEALHNHYTQKSLSLSPGK

SEQ ID NO: 1665 - protein, 238 aa, synthetic construct; identical to SEQ ID NO: 52
  REGION 1..238: note = Ab0488 HC Knob Fc-6xHis

SEQ ID NO: 1666 - protein, 5 aa, synthetic construct
  REGION 1..5: note = Ab0488 CDR H1
TYAMD

SEQ ID NO: 1667 - protein, 19 aa, synthetic construct
  REGION 1..19: note = Ab0488 CDR H2
RIRSKYNNYATYYADSVKG

SEQ ID NO: 1668 - protein, 14 aa, synthetic construct
  REGION 1..14: note = Ab0488 CDR H3
HGNFGNSYVSWFAY

SEQ ID NO: 1669 - protein, 14 aa, synthetic construct
  REGION 1..14: note = Ab0488 CDR L1
TSSTGAVTTSNYAN

SEQ ID NO: 1670 - protein, 7 aa, synthetic construct
  REGION 1..7: note = Ab0488 CDR L2
GTNKRAS

SEQ ID NO: 1671 - protein, 9 aa, synthetic construct
  REGION 1..9: note = Ab0488 CDR L3
ALWYSNLWV

SEQ ID NO: 1672 - protein, 481 aa, synthetic construct
  REGION 1..481: note = Ab0489 HC Hole scFv-Fc
EVQLVESGGGLVQPGGSLRLSCAASGFTFNTYAMNWVRQAPGKGLEWVARIRSKYNNYATYYADSVKGRFTISRDDSKSILYLQMNSLRAEDTAVYYCVRHGNFGNSYVSWFAYWGQGTLVTVSSGGGGSGGGGSGGGGSQAVVTQEPSLTVSPGGTVTLTCASSTGAVTTSNYANWVQQKPGQAFRGLIGGTNKKASWTPARFSGSLLGTDFALTLSGVQPEDEAEYYCALWYSNLWVFGGGTKLTVLGGGGSDKTHTCPPCPAPEAAGGPSVFLFPPKPKDTLMISRTPEVTCVVVDVSHEDPEVKFNWYVDGVEVHNAKTKPREEQYNSTYRVVSVLTVLHQDWLNGKEYKCKVSNKALGAPIEKTISKAKGQPREPQVYTLPPIRELMTSNQVSLSCAVKGFYPSDIAVEWESNGQPENNYKTTPPVLDSDGSFFLVSKLTVDKSRWQQGNVFSCSVMHEALHNHYTQKSLSLSPGK

SEQ ID NO: 1673 - protein, 238 aa, synthetic construct; identical to SEQ ID NO: 52
  REGION 1..238: note = Ab0489 HC Knob Fc-6xHis

SEQ ID NO: 1674 - protein, 5 aa, synthetic construct
  REGION 1..5: note = Ab0489 CDR H1
TYAMN

SEQ ID NO: 1675 - protein, 19 aa, synthetic construct
  REGION 1..19: note = Ab0489 CDR H2
RIRSKYNNYATYYADSVKG

SEQ ID NO: 1676 - protein, 14 aa, synthetic construct
  REGION 1..14: note = Ab0489 CDR H3
HGNFGNSYVSWFAY

SEQ ID NO: 1677 - protein, 14 aa, synthetic construct
  REGION 1..14: note = Ab0489 CDR L1
ASSTGAVTTSNYAN

SEQ ID NO: 1678 - protein, 7 aa, synthetic construct
  REGION 1..7: note = Ab0489 CDR L2
GTNKKAS

SEQ ID NO: 1679 - protein, 9 aa, synthetic construct
  REGION 1..9: note = Ab0489 CDR L3
ALWYSNLWV

SEQ ID NO: 1680 - protein, 482 aa, synthetic construct
  REGION 1..482: note = Ab0490 HC Hole scFv-Fc
EVQLVESGGGLVQPGGSLRLSCAASGFTFNTYAMNWVRQAPGKGLEWVARIRSKYNNYATYYADSVKGRFTISRDDSKSILYLQMNSLRAEDTAVYYCVRHGNFGNSYVSWFAYWGQGTLVTVSSGGGGSGGGGSGGGGSDIVVTQSPDSLAVSLGERATINCKSSTGAVTTSNYANWVQQKPGQPFKGLIGGTNKRASGVPDRFSGSLSGDDATLTISSLQAEDVAVYYCALWYSNLWVFGQGTKLEIKGGGGSDKTHTCPPCPAPEAAGGPSVFLFPPKPKDTLMISRTPEVTCVVVDVSHEDPEVKFNWYVDGVEVHNAKTKPREEQYNSTYRVVSVLTVLHQDWLNGKEYKCKVSNKALGAPIEKTISKAKGQPREPQVYTLPPIRELMTSNQVSLSCAVKGFYPSDIAVEWESNGQPENNYKTTPPVLDSDGSFFLVSKLTVDKSRWQQGNVFSCSVMHEALHNHYTQKSLSLSPGK

SEQ ID NO: 1681 - protein, 238 aa, synthetic construct; identical to SEQ ID NO: 52
  REGION 1..238: note = Ab0490 HC Knob Fc-6xHis

SEQ ID NO: 1682 - protein, 5 aa, synthetic construct
  REGION 1..5: note = Ab0490 CDR H1
TYAMN

SEQ ID NO: 1683 - protein, 19 aa, synthetic construct
  REGION 1..19: note = Ab0490 CDR H2
RIRSKYNNYATYYADSVKG

SEQ ID NO: 1684 - protein, 14 aa, synthetic construct
  REGION 1..14: note = Ab0490 CDR H3
HGNFGNSYVSWFAY

SEQ ID NO: 1685 - protein, 14 aa, synthetic construct
  REGION 1..14: note = Ab0490 CDR L1
KSSTGAVTTSNYAN

SEQ ID NO: 1686 - protein, 7 aa, synthetic construct
  REGION 1..7: note = Ab0490 CDR L2
GTNKRAS

SEQ ID NO: 1687 - protein, 9 aa, synthetic construct
  REGION 1..9: note = Ab0490 CDR L3
ALWYSNLWV

SEQ ID NO: 1688 - protein, 482 aa, synthetic construct
  REGION 1..482: note = Ab0491 HC Hole scFv-Fc
EVQLVESGGGLVQPGGSLRLSCAASGFTFNTYAMSWVRQAPGKGLEWVARIRSKYNNYATYYADSVKGRFTISRDDSKNTLYLQMNSLRAEDTAVYYCVRHGNFGNSYVSWFAYWGQGTLVTVSSGGGGSGGGGSGGGGSDIQVTQSPSSLSASVGDRVTITCRSSTGAVTTSNYANWVQQKPGKAFKGLIGGTNKLASGVPSRFSGSLSGDDATLTISSLQPEDFATYYCALWYSNLWVFGQGTKLEIKGGGGSDKTHTCPPCPAPEAAGGPSVFLFPPKPKDTLMISRTPEVTCVVVDVSHEDPEVKFNWYVDGVEVHNAKTKPREEQYNSTYRVVSVLTVLHQDWLNGKEYKCKVSNKALGAPIEKTISKAKGQPREPQVYTLPPIRELMTSNQVSLSCAVKGFYPSDIAVEWESNGQPENNYKTTPPVLDSDGSFFLVSKLTVDKSRWQQGNVFSCSVMHEALHNHYTQKSLSLSPGK

SEQ ID NO: 1689 - protein, 238 aa, synthetic construct; identical to SEQ ID NO: 52
  REGION 1..238: note = Ab0491 HC Knob Fc-6xHis

SEQ ID NO: 1690 - protein, 5 aa, synthetic construct
  REGION 1..5: note = Ab0491 CDR H1
TYAMS

SEQ ID NO: 1691 - protein, 19 aa, synthetic construct
  REGION 1..19: note = Ab0491 CDR H2
RIRSKYNNYATYYADSVKG

SEQ ID NO: 1692 - protein, 14 aa, synthetic construct
  REGION 1..14: note = Ab0491 CDR H3
HGNFGNSYVSWFAY

SEQ ID NO: 1693 - protein, 14 aa, synthetic construct
  REGION 1..14: note = Ab0491 CDR L1
RSSTGAVTTSNYAN

SEQ ID NO: 1694 - protein, 7 aa, synthetic construct
  REGION 1..7: note = Ab0491 CDR L2
GTNKLAS

SEQ ID NO: 1695 - protein, 9 aa, synthetic construct
  REGION 1..9: note = Ab0491 CDR L3
ALWYSNLWV

SEQ ID NO: 1696 - protein, 482 aa, synthetic construct
  REGION 1..482: note = Ab0492 HC Hole scFv-Fc
EVQLVESGSELKKPGASVKVSCKASGFTFNTYAMNWVRQAPGQGLEWVARIRSKYNNYATYYADGFTGRFVISRDDSVSILYLQISSLKAEDTAVYYCVRHGNFGNSYVSWFAYWGQGTLVTVSSGGGGSGGGGSGGGGSEIVVTQSPATLSLSPGERATLSCRSSTGAVTTSNYANWVQQKPGQAFRGLIGGTNKRATGIPARFSGSLSGTDFTLTISSLEPEDFAVYYCALWYSNLWVFGQGTKLEIKGGGGSDKTHTCPPCPAPEAAGGPSVFLFPPKPKDTLMISRTPEVTCVVVDVSHEDPEVKFNWYVDGVEVHNAKTKPREEQYNSTYRVVSVLTVLHQDWLNGKEYKCKVSNKALGAPIEKTISKAKGQPREPQVYTLPPIRELMTSNQVSLSCAVKGFYPSDIAVEWESNGQPENNYKTTPPVLDSDGSFFLVSKLTVDKSRWQQGNVFSCSVMHEALHNHYTQKSLSLSPGK

SEQ ID NO: 1697 - protein, 238 aa, synthetic construct; identical to SEQ ID NO: 52
  REGION 1..238: note = Ab0492 HC Knob Fc-6xHis

SEQ ID NO: 1698 - protein, 5 aa, synthetic construct
  REGION 1..5: note = Ab0492 CDR H1
TYAMN

SEQ ID NO: 1699 - protein, 19 aa, synthetic construct
  REGION 1..19: note = Ab0492 CDR H2
RIRSKYNNYATYYADGFTG

SEQ ID NO: 1700 - protein, 14 aa, synthetic construct
  REGION 1..14: note = Ab0492 CDR H3
HGNFGNSYVSWFAY

SEQ ID NO: 1701 - protein, 14 aa, synthetic construct
  REGION 1..14: note = Ab0492 CDR L1
RSSTGAVTTSNYAN

SEQ ID NO: 1702 - protein, 7 aa, synthetic construct
  REGION 1..7: note = Ab0492 CDR L2
GTNKRAT

SEQ ID NO: 1703 - protein, 9 aa, synthetic construct
  REGION 1..9: note = Ab0492 CDR L3
ALWYSNLWV

SEQ ID NO: 1704 - protein, 481 aa, synthetic construct
  REGION 1..481: note = Ab0493 HC Hole scFv-Fc
QVQLVQSGSELKKPGASVKVSCKASGFTFNTYAMNWVRQAPGQGLEWMARIRSKYNNYATYYADGFTGRFVFSRDDSVSTLYLQISSLKAEDTAVYYCVRHGNFGNSYVSWFAYWGQGTLVTVSSGGGGSGGGGSGGGGSQAAVTQPPSASGSPGQSVTISCTSSTGAVTTSNYANWVQQHPGKAFKGMIGGTNKRASGVPDRFSGSLSGDTASLTVSGLQAEDEADYYCALWYSNLWVFGGGTKLTVLGGGGSDKTHTCPPCPAPEAAGGPSVFLFPPKPKDTLMISRTPEVTCVVVDVSHEDPEVKFNWYVDGVEVHNAKTKPREEQYNSTYRVVSVLTVLHQDWLNGKEYKCKVSNKALGAPIEKTISKAKGQPREPQVYTLPPIRELMTSNQVSLSCAVKGFYPSDIAVEWESNGQPENNYKTTPPVLDSDGSFFLVSKLTVDKSRWQQGNVFSCSVMHEALHNHYTQKSLSLSPGK

SEQ ID NO: 1705 - protein, 238 aa, synthetic construct; identical to SEQ ID NO: 52
  REGION 1..238: note = Ab0493 HC Knob Fc-6xHis

SEQ ID NO: 1706 - protein, 5 aa, synthetic construct
  REGION 1..5: note = Ab0493 CDR H1
TYAMN

SEQ ID NO: 1707 - protein, 19 aa, synthetic construct
  REGION 1..19: note = Ab0493 CDR H2
RIRSKYNNYATYYADGFTG

SEQ ID NO: 1708 - protein, 14 aa, synthetic construct
  REGION 1..14: note = Ab0493 CDR H3
HGNFGNSYVSWFAY

SEQ ID NO: 1709 - protein, 14 aa, synthetic construct
  REGION 1..14: note = Ab0493 CDR L1
TSSTGAVTTSNYAN

SEQ ID NO: 1710 - protein, 7 aa, synthetic construct
  REGION 1..7: note = Ab0493 CDR L2
GTNKRAS

SEQ ID NO: 1711 - protein, 9 aa, synthetic construct
  REGION 1..9: note = Ab0493 CDR L3
ALWYSNLWV

SEQ ID NO: 1712 - protein, 481 aa, synthetic construct
  REGION 1..481: note = Ab0494 HC Hole scFv-Fc
QVQLVQSGAEVKKPGASVKVSCKASGFTFNTYAMHWVRQAPGQGLEWMARIRSKYNNYATYYADKFQGRVTMTRDDSTSTLYMELSSLRSEDTAVYYCVRHGNFGNSYVSWFAYWGQGTLVTVSSGGGGSGGGGSGGGGSQAVVTQEPSLTVSPGGTVTLTCASSTGAVTTSNYANWVQQKPGQAFRGLIGGTNKKASWTPARFSGSLLGTDFALTLSGVQPEDEAEYYCALWYSNLWVFGGGTKLTVLGGGGSDKTHTCPPCPAPEAAGGPSVFLFPPKPKDTLMISRTPEVTCVVVDVSHEDPEVKFNWYVDGVEVHNAKTKPREEQYNSTYRVVSVLTVLHQDWLNGKEYKCKVSNKALGAPIEKTISKAKGQPREPQVYTLPPIRELMTSNQVSLSCAVKGFYPSDIAVEWESNGQPENNYKTTPPVLDSDGSFFLVSKLTVDKSRWQQGNVFSCSVMHEALHNHYTQKSLSLSPGK

SEQ ID NO: 1713 - protein, 238 aa, synthetic construct; identical to SEQ ID NO: 52
  REGION 1..238: note = Ab0494 HC Knob Fc-6xHis

SEQ ID NO: 1714 - protein, 5 aa, synthetic construct
  REGION 1..5: note = Ab0494 CDR H1
TYAMH

SEQ ID NO: 1715 - protein, 19 aa, synthetic construct
  REGION 1..19: note = Ab0494 CDR H2
RIRSKYNNYATYYADKFQG

SEQ ID NO: 1716 - protein, 14 aa, synthetic construct
  REGION 1..14: note = Ab0494 CDR H3
HGNFGNSYVSWFAY

SEQ ID NO: 1717 - protein, 14 aa, synthetic construct
  REGION 1..14: note = Ab0494 CDR L1
ASSTGAVTTSNYAN

SEQ ID NO: 1718 - protein, 7 aa, synthetic construct
  REGION 1..7: note = Ab0494 CDR L2
GTNKKAS

SEQ ID NO: 1719 - protein, 9 aa, synthetic construct
  REGION 1..9: note = Ab0494 CDR L3
ALWYSNLWV

SEQ ID NO: 1720 - protein, 482 aa, synthetic construct
  REGION 1..482: note = Ab0495 HC Hole scFv-Fc
QVQLVQSGAEVKKPGASVKVSCKASGFTFNTYAMHWVRQAPGQGLEWMARIRSKYNNYATYYADKFQGRVTMTRDDSTSTLYMELSSLRSEDTAVYYCVRHGNFGNSYVSWFAYWGQGTLVTVSSGGGGSGGGGSGGGGSDIVVTQSPDSLAVSLGERATINCKSSTGAVTTSNYANWVQQKPGQPFKGLIGGTNKRASGVPDRFSGSLSGDDATLTISSLQAEDVAVYYCALWYSNLWVFGQGTKLEIKGGGGSDKTHTCPPCPAPEAAGGPSVFLFPPKPKDTLMISRTPEVTCVVVDVSHEDPEVKFNWYVDGVEVHNAKTKPREEQYNSTYRVVSVLTVLHQDWLNGKEYKCKVSNKALGAPIEKTISKAKGQPREPQVYTLPPIRELMTSNQVSLSCAVKGFYPSDIAVEWESNGQPENNYKTTPPVLDSDGSFFLVSKLTVDKSRWQQGNVFSCSVMHEALHNHYTQKSLSLSPGK

SEQ ID NO: 1721 - protein, 238 aa, synthetic construct; identical to SEQ ID NO: 52
  REGION 1..238: note = Ab0495 HC Knob Fc-6xHis

SEQ ID NO: 1722 - protein, 5 aa, synthetic construct
  REGION 1..5: note = Ab0495 CDR H1
TYAMH

SEQ ID NO: 1723 - protein, 19 aa, synthetic construct
  REGION 1..19: note = Ab0495 CDR H2
RIRSKYNNYATYYADKFQG

SEQ ID NO: 1724 - protein, 14 aa, synthetic construct
  REGION 1..14: note = Ab0495 CDR H3
HGNFGNSYVSWFAY

SEQ ID NO: 1725 - protein, 14 aa, synthetic construct
  REGION 1..14: note = Ab0495 CDR L1
KSSTGAVTTSNYAN

SEQ ID NO: 1726 - protein, 7 aa, synthetic construct
  REGION 1..7: note = Ab0495 CDR L2
GTNKRAS

SEQ ID NO: 1727 - protein, 9 aa, synthetic construct
  REGION 1..9: note = Ab0495 CDR L3
ALWYSNLWV

SEQ ID NO: 1728 - protein, 481 aa, synthetic construct
  REGION 1..481: note = Ab0496 HC Hole scFv-Fc
EVQLVESGGGLVQPGGSLRLSCAASGFTFNTYAMNWVRQAPGKGLEWVARIRSKYNNYATYYADSVKGRFTISRDDSKSILYLQMNSLKTEDTAVYYCVRHGNFGNSYVSWFAYWGQGTLVTVSSGGGGSGGGGSGGGGSQAVVTQEPSLTVSPGGTVTLTCASSTGAVTTSNYANWVQQKPGQAFRGLIGGTNKKASWTPARFSGSLLGDKAALTLSGVQPEDEAEYYCALWYSNLWVFGGGTKLTVLGGGGSDKTHTCPPCPAPEAAGGPSVFLFPPKPKDTLMISRTPEVTCVVVDVSHEDPEVKFNWYVDGVEVHNAKTKPREEQYNSTYRVVSVLTVLHQDWLNGKEYKCKVSNKALGAPIEKTISKAKGQPREPQVYTLPPIRELMTSNQVSLSCAVKGFYPSDIAVEWESNGQPENNYKTTPPVLDSDGSFFLVSKLTVDKSRWQQGNVFSCSVMHEALHNHYTQKSLSLSPGK

SEQ ID NO: 1729 - protein, 238 aa, synthetic construct; identical to SEQ ID NO: 52
  REGION 1..238: note = Ab0496 HC Knob Fc-6xHis

SEQ ID NO: 1730 - protein, 5 aa, synthetic construct
  REGION 1..5: note = Ab0496 CDR H1
TYAMN

SEQ ID NO: 1731 - protein, 19 aa, synthetic construct
  REGION 1..19: note = Ab0496 CDR H2
RIRSKYNNYATYYADSVKG

SEQ ID NO: 1732 - protein, 14 aa, synthetic construct
  REGION 1..14: note = Ab0496 CDR H3
HGNFGNSYVSWFAY

SEQ ID NO: 1733 - protein, 14 aa, synthetic construct
  REGION 1..14: note = Ab0496 CDR L1
ASSTGAVTTSNYAN

SEQ ID NO: 1734 - protein, 7 aa, synthetic construct
  REGION 1..7: note = Ab0496 CDR L2
GTNKKAS

SEQ ID NO: 1735 - protein, 9 aa, synthetic construct
  REGION 1..9: note = Ab0496 CDR L3
ALWYSNLWV

SEQ ID NO: 1736 - protein, 482 aa, synthetic construct
  REGION 1..482: note = Ab0497 HC Hole scFv-Fc
EVQLVESGGGLVQPGGSLRLSCAASGFTFNTYAMNWVRQAPGKGLEWVARIRSKYNNYATYYADSVKGRFTISRDDSKSILYLQMNSLKTEDTAVYYCVRHGNFGNSYVSWFAYWGQGTLVTVSSGGGGSGGGGSGGGGSDIQVTQSPSSLSASVGDRVTITCRSSTGAVTTSNYANWVQQKPGKAFKGLIGGTNKLASGVPSRFSGSLSGDDATLTISSLQPEDFATYYCALWYSNLWVFGQGTKLEIKGGGGSDKTHTCPPCPAPEAAGGPSVFLFPPKPKDTLMISRTPEVTCVVVDVSHEDPEVKFNWYVDGVEVHNAKTKPREEQYNSTYRVVSVLTVLHQDWLNGKEYKCKVSNKALGAPIEKTISKAKGQPREPQVYTLPPIRELMTSNQVSLSCAVKGFYPSDIAVEWESNGQPENNYKTTPPVLDSDGSFFLVSKLTVDKSRWQQGNVFSCSVMHEALHNHYTQKSLSLSPGK

SEQ ID NO: 1737 - protein, 238 aa, synthetic construct; identical to SEQ ID NO: 52
  REGION 1..238: note = Ab0497 HC Knob Fc-6xHis

SEQ ID NO: 1738 - protein, 5 aa, synthetic construct
  REGION 1..5: note = Ab0497 CDR H1
TYAMN

SEQ ID NO: 1739 - protein, 19 aa, synthetic construct
  REGION 1..19: note = Ab0497 CDR H2
RIRSKYNNYATYYADSVKG

SEQ ID NO: 1740 - protein, 14 aa, synthetic construct
  REGION 1..14: note = Ab0497 CDR H3
HGNFGNSYVSWFAY

SEQ ID NO: 1741 - protein, 14 aa, synthetic construct
  REGION 1..14: note = Ab0497 CDR L1
RSSTGAVTTSNYAN

SEQ ID NO: 1742 - protein, 7 aa, synthetic construct
  REGION 1..7: note = Ab0497 CDR L2
GTNKLAS

SEQ ID NO: 1743 - protein, 9 aa, synthetic construct
  REGION 1..9: note = Ab0497 CDR L3
ALWYSNLWV

SEQ ID NO: 1744 - protein, 482 aa, synthetic construct
  REGION 1..482: note = Ab0498 HC Hole scFv-Fc
EVQLVESGGGLVQPGGSLRLSCAASGFTFNTYAMDWVRQAPGKGLEWVARIRSKYNNYATYYADSVKGRFTISRDDSKNSLYLQMNSLKTEDTAVYYCVRHGNFGNSYVSWFAYWGQGTLVTVSSGGGGSGGGGSGGGGSEIVVTQSPATLSLSPGERATLSCRSSTGAVTTSNYANWVQEKPGQAFRGLIGGTNKRAPGVPARFSGSLIGTDFTLTISSLEPEDFAVYFCALWYSNLWVFGQGTKLEIKGGGGSDKTHTCPPCPAPEAAGGPSVFLFPPKPKDTLMISRTPEVTCVVVDVSHEDPEVKFNWYVDGVEVHNAKTKPREEQYNSTYRVVSVLTVLHQDWLNGKEYKCKVSNKALGAPIEKTISKAKGQPREPQVYTLPPIRELMTSNQVSLSCAVKGFYPSDIAVEWESNGQPENNYKTTPPVLDSDGSFFLVSKLTVDKSRWQQGNVFSCSVMHEALHNHYTQKSLSLSPGK

SEQ ID NO: 1745 - protein, 238 aa, synthetic construct; identical to SEQ ID NO: 52
  REGION 1..238: note = Ab0498 HC Knob Fc-6xHis

SEQ ID NO: 1746 - protein, 5 aa, synthetic construct
  REGION 1..5: note = Ab0498 CDR H1
TYAMD

SEQ ID NO: 1747 - protein, 19 aa, synthetic construct
  REGION 1..19: note = Ab0498 CDR H2
RIRSKYNNYATYYADSVKG

SEQ ID NO: 1748 - protein, 14 aa, synthetic construct
  REGION 1..14: note = Ab0498 CDR H3
HGNFGNSYVSWFAY

SEQ ID NO: 1749 - protein, 14 aa, synthetic construct
  REGION 1..14: note = Ab0498 CDR L1
RSSTGAVTTSNYAN

SEQ ID NO: 1750 - protein, 7 aa, synthetic construct
  REGION 1..7: note = Ab0498 CDR L2
GTNKRAP

SEQ ID NO: 1751 - protein, 9 aa, synthetic construct
  REGION 1..9: note = Ab0498 CDR L3
ALWYSNLWV

SEQ ID NO: 1752 - protein, 481 aa, synthetic construct
  REGION 1..481: note = Ab0499 HC Hole scFv-Fc
EVQLVESGGGLVQPGGSLRLSCAASGFTFNTYAMNWVRQAPGKGLEWVARIRSKYNNYATYYADSVKGRFTISRDDSKSILYLQMNSLRAEDTAVYYCVRHGNFGNSYVSWFAYWGQGTLVTVSSGGGGSGGGGSGGGGSQAVVTQEPSFSVSPGGTVTLTCGSSTGAVTTSNYANWVQQTPGQAFRGLIGGTNKRASGVPDRFSGSLLGDKAALTITGAQADDESDYYCALWYSNLWVFGGGTKLTVLGGGGSDKTHTCPPCPAPEAAGGPSVFLFPPKPKDTLMISRTPEVTCVVVDVSHEDPEVKFNWYVDGVEVHNAKTKPREEQYNSTYRVVSVLTVLHQDWLNGKEYKCKVSNKALGAPIEKTISKAKGQPREPQVYTLPPIRELMTSNQVSLSCAVKGFYPSDIAVEWESNGQPENNYKTTPPVLDSDGSFFLVSKLTVDKSRWQQGNVFSCSVMHEALHNHYTQKSLSLSPGK

SEQ ID NO: 1753 - protein, 238 aa, synthetic construct; identical to SEQ ID NO: 52
  REGION 1..238: note = Ab0499 HC Knob Fc-6xHis

SEQ ID NO: 1754 - protein, 5 aa, synthetic construct
  REGION 1..5: note = Ab0499 CDR H1
TYAMN

SEQ ID NO: 1755 - protein, 19 aa, synthetic construct
  REGION 1..19: note = Ab0499 CDR H2
RIRSKYNNYATYYADSVKG

SEQ ID NO: 1756 - protein, 14 aa, synthetic construct
  REGION 1..14: note = Ab0499 CDR H3
HGNFGNSYVSWFAY

SEQ ID NO: 1757 - protein, 14 aa, synthetic construct
  REGION 1..14: note = Ab0499 CDR L1
GSSTGAVTTSNYAN

SEQ ID NO: 1758 - protein, 7 aa, synthetic construct
  REGION 1..7: note = Ab0499 CDR L2
GTNKRAS

SEQ ID NO: 1759 - protein, 9 aa, synthetic construct
  REGION 1..9: note = Ab0499 CDR L3
ALWYSNLWV

SEQ ID NO: 1760 - protein, 481 aa, synthetic construct
  REGION 1..481: note = Ab0500 HC Hole scFv-Fc
EVQLVESGGGLVQPGGSLRLSCAASGFTFNTYAMSWVRQAPGKGLEWVARIRSKYNNYATYYADSVKGRFTISRDDSKNTLYLQMNSLRAEDTAVYYCVRHGNFGNSYVSWFAYWGQGTLVTVSSGGGGSGGGGSGGGGSQAVVTQEPSLTVSPGGTVTLTCASSTGAVTTSNYANWVQEKPGQAFRGLIGGTNKRAPWVPARFSGSLIGDKAALTLSGVQPEDEAEYFCALWYSNLWVFGGGTKLTVLGGGGSDKTHTCPPCPAPEAAGGPSVFLFPPKPKDTLMISRTPEVTCVVVDVSHEDPEVKFNWYVDGVEVHNAKTKPREEQYNSTYRVVSVLTVLHQDWLNGKEYKCKVSNKALGAPIEKTISKAKGQPREPQVYTLPPIRELMTSNQVSLSCAVKGFYPSDIAVEWESNGQPENNYKTTPPVLDSDGSFFLVSKLTVDKSRWQQGNVFSCSVMHEALHNHYTQKSLSLSPGK

SEQ ID NO: 1761 - protein, 238 aa, synthetic construct; identical to SEQ ID NO: 52
  REGION 1..238: note = Ab0500 HC Knob Fc-6xHis

SEQ ID NO: 1762 - protein, 5 aa, synthetic construct
  REGION 1..5: note = Ab0500 CDR H1
TYAMS

SEQ ID NO: 1763 - protein, 19 aa, synthetic construct
  REGION 1..19: note = Ab0500 CDR H2
RIRSKYNNYATYYADSVKG

SEQ ID NO: 1764 - protein, 14 aa, synthetic construct
  REGION 1..14: note = Ab0500 CDR H3
HGNFGNSYVSWFAY

SEQ ID NO: 1765 - protein, 14 aa, synthetic construct
  REGION 1..14: note = Ab0500 CDR L1
ASSTGAVTTSNYAN

SEQ ID NO: 1766 - protein, 7 aa, synthetic construct
  REGION 1..7: note = Ab0500 CDR L2
GTNKRAP

SEQ ID NO: 1767 - protein, 9 aa, synthetic construct
  REGION 1..9: note = Ab0500 CDR L3
ALWYSNLWV

SEQ ID NO: 1768 - protein, 482 aa, synthetic construct
  REGION 1..482: note = Ab0501 HC Hole scFv-Fc
EVQLVESGGGLVQPGGSLRLSCAASGFTFNTYAMSWVRQAPGKGLEWVARIRSKYNNYATYYADSVKGRFTISRDDSKNTLYLQMNSLRAEDTAVYYCVRHGNFGNSYVSWFAYWGQGTLVTVSSGGGGSGGGGSGGGGSDIVVTQSPDSLAVSLGERATINCKSSTGAVTTSNYANWVQQKPGQPFKGLIGGTNKRASGVPDRFSGSLSGDDATLTISSLQAEDVAVYYCALWYSNLWVFGQGTKLEIKGGGGSDKTHTCPPCPAPEAAGGPSVFLFPPKPKDTLMISRTPEVTCVVVDVSHEDPEVKFNWYVDGVEVHNAKTKPREEQYNSTYRVVSVLTVLHQDWLNGKEYKCKVSNKALGAPIEKTISKAKGQPREPQVYTLPPIRELMTSNQVSLSCAVKGFYPSDIAVEWESNGQPENNYKTTPPVLDSDGSFFLVSKLTVDKSRWQQGNVFSCSVMHEALHNHYTQKSLSLSPGK

SEQ ID NO: 1769 - protein, 238 aa, synthetic construct; identical to SEQ ID NO: 52
  REGION 1..238: note = Ab0501 HC Knob Fc-6xHis

SEQ ID NO: 1770 - protein, 5 aa, synthetic construct
  REGION 1..5: note = Ab0501 CDR H1
TYAMS

SEQ ID NO: 1771 - protein, 19 aa, synthetic construct
  REGION 1..19: note = Ab0501 CDR H2
RIRSKYNNYATYYADSVKG

SEQ ID NO: 1772 - protein, 14 aa, synthetic construct
  REGION 1..14: note = Ab0501 CDR H3
HGNFGNSYVSWFAY

SEQ ID NO: 1773 - protein, 14 aa, synthetic construct
  REGION 1..14: note = Ab0501 CDR L1
KSSTGAVTTSNYAN

SEQ ID NO: 1774 - protein, 7 aa, synthetic construct
  REGION 1..7: note = Ab0501 CDR L2
GTNKRAS

SEQ ID NO: 1775 - protein, 9 aa, synthetic construct
  REGION 1..9: note = Ab0501 CDR L3
ALWYSNLWV

SEQ ID NO: 1776 - protein, 482 aa, synthetic construct
  REGION 1..482: note = Ab0502 HC Hole scFv-Fc
EVQLVESGSELKKPGASVKVSCKASGFTFNTYAMNWVRQAPGQGLEWVARIRSKYNNYATYYADGFTGRFVISRDDSVSILYLQISSLKAEDTAVYYCVRHGNFGNSYVSWFAYWGQGTLVTVSSGGGGSGGGGSGGGGSDIQVTQSPSSLSASVGDRVTITCRSSTGAVTTSNYANWVQQKPGKAFKGLIGGTNKLASGVPSRFSGSLSGDDATLTISSLQPEDFATYYCALWYSNLWVFGQGTKLEIKGGGGSDKTHTCPPCPAPEAAGGPSVFLFPPKPKDTLMISRTPEVTCVVVDVSHEDPEVKFNWYVDGVEVHNAKTKPREEQYNSTYRVVSVLTVLHQDWLNGKEYKCKVSNKALGAPIEKTISKAKGQPREPQVYTLPPIRELMTSNQVSLSCAVKGFYPSDIAVEWESNGQPENNYKTTPPVLDSDGSFFLVSKLTVDKSRWQQGNVFSCSVMHEALHNHYTQKSLSLSPGK

SEQ ID NO: 1777 - protein, 238 aa, synthetic construct; identical to SEQ ID NO: 52
  REGION 1..238: note = Ab0502 HC Knob Fc-6xHis

SEQ ID NO: 1778 - protein, 5 aa, synthetic construct
  REGION 1..5: note = Ab0502 CDR H1
TYAMN

SEQ ID NO: 1779 - protein, 19 aa, synthetic construct
  REGION 1..19: note = Ab0502 CDR H2
RIRSKYNNYATYYADGFTG

SEQ ID NO: 1780 - protein, 14 aa, synthetic construct
  REGION 1..14: note = Ab0502 CDR H3
HGNFGNSYVSWFAY

SEQ ID NO: 1781 - protein, 14 aa, synthetic construct
  REGION 1..14: note = Ab0502 CDR L1
RSSTGAVTTSNYAN

SEQ ID NO: 1782 - protein, 7 aa, synthetic construct
  REGION 1..7: note = Ab0502 CDR L2
GTNKLAS

SEQ ID NO: 1783 - protein, 9 aa, synthetic construct
  REGION 1..9: note = Ab0502 CDR L3
ALWYSNLWV

SEQ ID NO: 1784 - protein, 482 aa, synthetic construct
  REGION 1..482: note = Ab0503 HC Hole scFv-Fc
QVQLVQSGSELKKPGASVKVSCKASGFTFNTYAMNWVRQAPGQGLEWMARIRSKYNNYATYYADGFTGRFVFSRDDSVSTLYLQISSLKAEDTAVYYCVRHGNFGNSYVSWFAYWGQGTLVTVSSGGGGSGGGGSGGGGSEIVVTQSPATLSLSPGERATLSCRSSTGAVTTSNYANWVQEKPGQAFRGLIGGTNKRAPGVPARFSGSLIGTDFTLTISSLEPEDFAVYFCALWYSNLWVFGQGTKLEIKGGGGSDKTHTCPPCPAPEAAGGPSVFLFPPKPKDTLMISRTPEVTCVVVDVSHEDPEVKFNWYVDGVEVHNAKTKPREEQYNSTYRVVSVLTVLHQDWLNGKEYKCKVSNKALGAPIEKTISKAKGQPREPQVYTLPPIRELMTSNQVSLSCAVKGFYPSDIAVEWESNGQPENNYKTTPPVLDSDGSFFLVSKLTVDKSRWQQGNVFSCSVMHEALHNHYTQKSLSLSPGK

SEQ ID NO: 1785 - protein, 238 aa, synthetic construct; identical to SEQ ID NO: 52
  REGION 1..238: note = Ab0503 HC Knob Fc-6xHis

SEQ ID NO: 1786 - protein, 5 aa, synthetic construct
  REGION 1..5: note = Ab0503 CDR H1
TYAMN

SEQ ID NO: 1787 - protein, 19 aa, synthetic construct
  REGION 1..19: note = Ab0503 CDR H2
RIRSKYNNYATYYADGFTG

SEQ ID NO: 1788 - protein, 14 aa, synthetic construct
  REGION 1..14: note = Ab0503 CDR H3
HGNFGNSYVSWFAY

SEQ ID NO: 1789 - protein, 14 aa, synthetic construct
  REGION 1..14: note = Ab0503 CDR L1
RSSTGAVTTSNYAN

SEQ ID NO: 1790 - protein, 7 aa, synthetic construct
  REGION 1..7: note = Ab0503 CDR L2
GTNKRAP

SEQ ID NO: 1791 - protein, 9 aa, synthetic construct
  REGION 1..9: note = Ab0503 CDR L3
ALWYSNLWV

SEQ ID NO: 1792 - protein, 481 aa, synthetic construct
  REGION 1..481: note = Ab0504 HC Hole scFv-Fc
QVQLVQSGAEVKKPGASVKVSCKASGFTFNTYAMHWVRQAPGQGLEWMARIRSKYNNYATYYADKFQGRVTMTRDDSTSTLYMELSSLRSEDTAVYYCVRHGNFGNSYVSWFAYWGQGTLVTVSSGGGGSGGGGSGGGGSQAVVTQEPSFSVSPGGTVTLTCGSSTGAVTTSNYANWVQQTPGQAFRGLIGGTNKRASGVPDRFSGSLLGDKAALTITGAQADDESDYYCALWYSNLWVFGGGTKLTVLGGGGSDKTHTCPPCPAPEAAGGPSVFLFPPKPKDTLMISRTPEVTCVVVDVSHEDPEVKFNWYVDGVEVHNAKTKPREEQYNSTYRVVSVLTVLHQDWLNGKEYKCKVSNKALGAPIEKTISKAKGQPREPQVYTLPPIRELMTSNQVSLSCAVKGFYPSDIAVEWESNGQPENNYKTTPPVLDSDGSFFLVSKLTVDKSRWQQGNVFSCSVMHEALHNHYTQKSLSLSPGK

SEQ ID NO: 1793 - protein, 238 aa, synthetic construct; identical to SEQ ID NO: 52
  REGION 1..238: note = Ab0504 HC Knob Fc-6xHIs

SEQ ID NO: 1794 - protein, 5 aa, synthetic construct
  REGION 1..5: note = Ab0504 CDR H1
TYAMH

SEQ ID NO: 1795 - protein, 19 aa, synthetic construct
  REGION 1..19: note = Ab0504 CDR H2
RIRSKYNNYATYYADKFQG

SEQ ID NO: 1796 - protein, 14 aa, synthetic construct
  REGION 1..14: note = Ab0504 CDR H3
HGNFGNSYVSWFAY

SEQ ID NO: 1797 - protein, 14 aa, synthetic construct
  REGION 1..14: note = Ab0504 CDR L1
GSSTGAVTTSNYAN

SEQ ID NO: 1798 - protein, 7 aa, synthetic construct
  REGION 1..7: note = Ab0504 CDR L2
GTNKRAS

SEQ ID NO: 1799 - protein, 9 aa, synthetic construct
  REGION 1..9: note = Ab0504 CDR L3
ALWYSNLWV

SEQ ID NO: 1800 - protein, 481 aa, synthetic construct
  REGION 1..481: note = Ab0505 HC Hole scFv-Fc
EVQLVESGGGLVQPGGSLRLSCAASGFTFNTYAMNWVRQAPGKGLEWVARIRSKYNNYATYYADSVKGRFTISRDDSKSILYLQMNSLKTEDTAVYYCVRHGNFGNSYVSWFAYWGQGTLVTVSSGGGGSGGGGSGGGGSQAVVTQEPSLTVSPGGTVTLTCASSTGAVTTSNYANWVQQKPGQAFRGLIGGTNKKASWTPARFSGSLLGTDFALTLSGVQPEDEAEYYCALWYSNLWVFGGGTKLTVLGGGGSDKTHTCPPCPAPEAAGGPSVFLFPPKPKDTLMISRTPEVTCVVVDVSHEDPEVKFNWYVDGVEVHNAKTKPREEQYNSTYRVVSVLTVLHQDWLNGKEYKCKVSNKALGAPIEKTISKAKGQPREPQVYTLPPIRELMTSNQVSLSCAVKGFYPSDIAVEWESNGQPENNYKTTPPVLDSDGSFFLVSKLTVDKSRWQQGNVFSCSVMHEALHNHYTQKSLSLSPGK

SEQ ID NO: 1801 - protein, 238 aa, synthetic construct; identical to SEQ ID NO: 52
  REGION 1..238: note = Ab0505 HC knob Fc-6xHis

SEQ ID NO: 1802 - protein, 5 aa, synthetic construct
  REGION 1..5: note = Ab0505 CDR H1
TYAMN

SEQ ID NO: 1803 - protein, 19 aa, synthetic construct
  REGION 1..19: note = Ab0505 CDR H2
RIRSKYNNYATYYADSVKG

SEQ ID NO: 1804 - protein, 14 aa, synthetic construct
  REGION 1..14: note = Ab0505 CDR H3
HGNFGNSYVSWFAY

SEQ ID NO: 1805 - protein, 14 aa, synthetic construct
  REGION 1..14: note = Ab0505 CDR L1
ASSTGAVTTSNYAN

SEQ ID NO: 1806 - protein, 7 aa, synthetic construct
  REGION 1..7: note = Ab0505 CDR L2
GTNKKAS

SEQ ID NO: 1807 - protein, 9 aa, synthetic construct
  REGION 1..9: note = Ab0505 CDR L3
ALWYSNLWV

SEQ ID NO: 1808 - protein, 482 aa, synthetic construct
  REGION 1..482: note = Ab0506 HC Hole scFv-Fc
EVQLVESGGGLVQPGGSLRLSCAASGFTFNTYAMNWVRQAPGKGLEWVARIRSKYNNYATYYADSVKGRFTISRDDSKSILYLQMNSLKTEDTAVYYCVRHGNFGNSYVSWFAYWGQGTLVTVSSGGGGSGGGGSGGGGSDIVVTQSPDSLAVSLGERATINCKSSTGAVTTSNYANWVQQKPGQPFKGLIGGTNKRASGVPDRFSGSLSGDDATLTISSLQAEDVAVYYCALWYSNLWVFGQGTKLEIKGGGGSDKTHTCPPCPAPEAAGGPSVFLFPPKPKDTLMISRTPEVTCVVVDVSHEDPEVKFNWYVDGVEVHNAKTKPREEQYNSTYRVVSVLTVLHQDWLNGKEYKCKVSNKALGAPIEKTISKAKGQPREPQVYTLPPIRELMTSNQVSLSCAVKGFYPSDIAVEWESNGQPENNYKTTPPVLDSDGSFFLVSKLTVDKSRWQQGNVFSCSVMHEALHNHYTQKSLSLSPGK

SEQ ID NO: 1809 - protein, 238 aa, synthetic construct; identical to SEQ ID NO: 52
  REGION 1..238: note = Ab0506 HC Knob Fc-6xHis

SEQ ID NO: 1810 - protein, 5 aa, synthetic construct
  REGION 1..5: note = Ab0506 CDR H1
TYAMN

SEQ ID NO: 1811 - protein, 19 aa, synthetic construct
  REGION 1..19: note = Ab0506 CDR H2
RIRSKYNNYATYYADSVKG

SEQ ID NO: 1812 - protein, 14 aa, synthetic construct
  REGION 1..14: note = Ab0506 CDR H3
HGNFGNSYVSWFAY

SEQ ID NO: 1813 - protein, 14 aa, synthetic construct
  REGION 1..14: note = Ab0506 CDR L1
KSSTGAVTTSNYAN

SEQ ID NO: 1814 - protein, 7 aa, synthetic construct
  REGION 1..7: note = Ab0506 CDR L2
GTNKRAS

SEQ ID NO: 1815 - protein, 9 aa, synthetic construct
  REGION 1..9: note = Ab0506 CDR L3
ALWYSNLWV

SEQ ID NO: 1816 - protein, 482 aa, synthetic construct
  REGION 1..482: note = Ab0507 HC Hole scFv-Fc
EVQLVESGGGLVQPGGSLRLSCAASGFTFNTYAMDWVRQAPGKGLEWVARIRSKYNNYATYYADSVKGRFTISRDDSKNSLYLQMNSLKTEDTAVYYCVRHGNFGNSYVSWFAYWGQGTLVTVSSGGGGSGGGGSGGGGSEIVVTQSPATLSLSPGERATLSCRSSTGAVTTSNYANWVQQKPGQAFRGLIGGTNKRATGIPARFSGSLSGDDATLTISSLEPEDFAVYYCALWYSNLWVFGQGTKLEIKGGGGSDKTHTCPPCPAPEAAGGPSVFLFPPKPKDTLMISRTPEVTCVVVDVSHEDPEVKFNWYVDGVEVHNAKTKPREEQYNSTYRVVSVLTVLHQDWLNGKEYKCKVSNKALGAPIEKTISKAKGQPREPQVYTLPPIRELMTSNQVSLSCAVKGFYPSDIAVEWESNGQPENNYKTTPPVLDSDGSFFLVSKLTVDKSRWQQGNVFSCSVMHEALHNHYTQKSLSLSPGK

SEQ ID NO: 1817 - protein, 238 aa, synthetic construct; identical to SEQ ID NO: 52
  REGION 1..238: note = Ab0507 HC Knob Fc-6xHis

SEQ ID NO: 1818 - protein, 5 aa, synthetic construct
  REGION 1..5: note = Ab0507 CDR H1
TYAMD

SEQ ID NO: 1819 - protein, 19 aa, synthetic construct
  REGION 1..19: note = Ab0507 CDR H2
RIRSKYNNYATYYADSVKG

SEQ ID NO: 1820 - protein, 14 aa, synthetic construct
  REGION 1..14: note = Ab0507 CDR H3
HGNFGNSYVSWFAY

SEQ ID NO: 1821 - protein, 14 aa, synthetic construct
  REGION 1..14: note = Ab0507 CDR L1
RSSTGAVTTSNYAN

SEQ ID NO: 1822 - protein, 7 aa, synthetic construct
  REGION 1..7: note = Ab0507 CDR L2
GTNKRAT

SEQ ID NO: 1823 - protein, 9 aa, synthetic construct
  REGION 1..9: note = Ab0507 CDR L3
ALWYSNLWV

SEQ ID NO: 1824 - protein, 481 aa, synthetic construct
  REGION 1..481: note = Ab0508 HC Hole scFv-Fc
EVQLVESGGGLVQPGGSLRLSCAASGFTFNTYAMNWVRQAPGKGLEWVARIRSKYNNYATYYADSVKGRFTISRDDSKSILYLQMNSLRAEDTAVYYCVRHGNFGNSYVSWFAYWGQGTLVTVSSGGGGSGGGGSGGGGSQAVVTQPPSVSAAPGQKVTISCSSSTGAVTTSNYANWVQQLPGTAFKGLIGGTNKRASGIPDRFSGSLSGDSATLGITGLQTGDEADYYCALWYSNLWVFGGGTKLTVLGGGGSDKTHTCPPCPAPEAAGGPSVFLFPPKPKDTLMISRTPEVTCVVVDVSHEDPEVKFNWYVDGVEVHNAKTKPREEQYNSTYRVVSVLTVLHQDWLNGKEYKCKVSNKALGAPIEKTISKAKGQPREPQVYTLPPIRELMTSNQVSLSCAVKGFYPSDIAVEWESNGQPENNYKTTPPVLDSDGSFFLVSKLTVDKSRWQQGNVFSCSVMHEALHNHYTQKSLSLSPGK

SEQ ID NO: 1825 - protein, 238 aa, synthetic construct; identical to SEQ ID NO: 52
  REGION 1..238: note = Ab0508 HC Knob Fc-6xHis

SEQ ID NO: 1826 - protein, 5 aa, synthetic construct
  REGION 1..5: note = Ab0508 CDR H1
TYAMN

SEQ ID NO: 1827 - protein, 19 aa, synthetic construct
  REGION 1..19: note = Ab0508 CDR H2
RIRSKYNNYATYYADSVKG

SEQ ID NO: 1828 - protein, 14 aa, synthetic construct
  REGION 1..14: note = Ab0508 CDR H3
HGNFGNSYVSWFAY

SEQ ID NO: 1829 - protein, 14 aa, synthetic construct
  REGION 1..14: note = Ab0508 CDR L1
SSSTGAVTTSNYAN

SEQ ID NO: 1830 - protein, 7 aa, synthetic construct
  REGION 1..7: note = Ab0508 CDR L2
GTNKRAS

SEQ ID NO: 1831 - protein, 9 aa, synthetic construct
  REGION 1..9: note = A0508 CDR L3
ALWYSNLWV

SEQ ID NO: 1832 - protein, 481 aa, synthetic construct
  REGION 1..481: note = Ab0509 HC Hole scFv-Fc
EVQLVESGGGLVQPGGSLRLSCAASGFTFNTYAMSWVRQAPGKGLEWVARIRSKYNNYATYYADSVKGRFTISRDDSKNTLYLQMNSLRAEDTAVYYCVRHGNFGNSYVSWFAYWGQGTLVTVSSGGGGSGGGGSGGGGSQAVVTQEPSLTVSPGGTVTLTCASSTGAVTTSNYANWVQQKPGQAFRGLIGGTNKKASWTPARFSGSLLGDKAALTLSGVQPEDEAEYYCALWYSNLWVFGGGTKLTVLGGGGSDKTHTCPPCPAPEAAGGPSVFLFPPKPKDTLMISRTPEVTCVVVDVSHEDPEVKFNWYVDGVEVHNAKTKPREEQYNSTYRVVSVLTVLHQDWLNGKEYKCKVSNKALGAPIEKTISKAKGQPREPQVYTLPPIRELMTSNQVSLSCAVKGFYPSDIAVEWESNGQPENNYKTTPPVLDSDGSFFLVSKLTVDKSRWQQGNVFSCSVMHEALHNHYTQKSLSLSPGK

SEQ ID NO: 1833 - protein, 238 aa, synthetic construct; identical to SEQ ID NO: 52
  REGION 1..238: note = Ab0509 HC Knob Fc-6xHis

SEQ ID NO: 1834 - protein, 5 aa, synthetic construct
  REGION 1..5: note = Ab0509 CDR H1
TYAMS

SEQ ID NO: 1835 - protein, 19 aa, synthetic construct
  REGION 1..19: note = Ab0509 CDR H2
RIRSKYNNYATYYADSVKG

SEQ ID NO: 1836 - protein, 14 aa, synthetic construct
  REGION 1..14: note = Ab0509 CDR H3
HGNFGNSYVSWFAY

SEQ ID NO: 1837 - protein, 14 aa, synthetic construct
  REGION 1..14: note = Ab0509 CDR L1
ASSTGAVTTSNYAN

SEQ ID NO: 1838 - protein, 7 aa, synthetic construct
  REGION 1..7: note = Ab0509 CDR L2
GTNKKAS

SEQ ID NO: 1839 - protein, 9 aa, synthetic construct
  REGION 1..9: note = Ab0509 CDR L3
ALWYSNLWV

SEQ ID NO: 1840 - protein, 481 aa, synthetic construct
  REGION 1..481: note = Ab0510 HC Hole scFv-Fc
EVQLVESGSELKKPGASVKVSCKASGFTFNTYAMNWVRQAPGQGLEWVARIRSKYNNYATYYADGFTGRFVISRDDSVSILYLQISSLKAEDTAVYYCVRHGNFGNSYVSWFAYWGQGTLVTVSSGGGGSGGGGSGGGGSQAVVTQEPSLTVSPGGTVTLTCASSTGAVTTSNYANWVQEKPGQAFRGLIGGTNKRAPWVPARFSGSLIGDKAALTLSGVQPEDEAEYFCALWYSNLWVFGGGTKLTVLGGGGSDKTHTCPPCPAPEAAGGPSVFLFPPKPKDTLMISRTPEVTCVVVDVSHEDPEVKFNWYVDGVEVHNAKTKPREEQYNSTYRVVSVLTVLHQDWLNGKEYKCKVSNKALGAPIEKTISKAKGQPREPQVYTLPPIRELMTSNQVSLSCAVKGFYPSDIAVEWESNGQPENNYKTTPPVLDSDGSFFLVSKLTVDKSRWQQGNVFSCSVMHEALHNHYTQKSLSLSPGK

SEQ ID NO: 1841 - protein, 238 aa, synthetic construct; identical to SEQ ID NO: 52
  REGION 1..238: note = Ab0510 HC knob Fc-6xHis

SEQ ID NO: 1842 - protein, 5 aa, synthetic construct
  REGION 1..5: note = Ab0510 CDR H1
TYAMN

SEQ ID NO: 1843 - protein, 19 aa, synthetic construct
  REGION 1..19: note = Ab0510 CDR H2
RIRSKYNNYATYYADGFTG

SEQ ID NO: 1844 - protein, 14 aa, synthetic construct
  REGION 1..14: note = Ab0510 CDR H3
HGNFGNSYVSWFAY

SEQ ID NO: 1845 - protein, 14 aa, synthetic construct
  REGION 1..14: note = Ab0510 CDR L1
ASSTGAVTTSNYAN

SEQ ID NO: 1846 - protein, 7 aa, synthetic construct
  REGION 1..7: note = Ab0510 CDR L2
GTNKRAP

SEQ ID NO: 1847 - protein, 9 aa, synthetic construct
  REGION 1..9: note = Ab0510 CDR L3
ALWYSNLWV

SEQ ID NO: 1848 - protein, 482 aa, synthetic construct
  REGION 1..482: note = Ab0511 HC Hole scFv-Fc
EVQLVESGSELKKPGASVKVSCKASGFTFNTYAMNWVRQAPGQGLEWVARIRSKYNNYATYYADGFTGRFVISRDDSVSILYLQISSLKAEDTAVYYCVRHGNFGNSYVSWFAYWGQGTLVTVSSGGGGSGGGGSGGGGSDIVVTQSPDSLAVSLGERATINCKSSTGAVTTSNYANWVQQKPGQPFKGLIGGTNKRASGVPDRFSGSLSGDDATLTISSLQAEDVAVYYCALWYSNLWVFGQGTKLEIKGGGGSDKTHTCPPCPAPEAAGGPSVFLFPPKPKDTLMISRTPEVTCVVVDVSHEDPEVKFNWYVDGVEVHNAKTKPREEQYNSTYRVVSVLTVLHQDWLNGKEYKCKVSNKALGAPIEKTISKAKGQPREPQVYTLPPIRELMTSNQVSLSCAVKGFYPSDIAVEWESNGQPENNYKTTPPVLDSDGSFFLVSKLTVDKSRWQQGNVFSCSVMHEALHNHYTQKSLSLSPGK

SEQ ID NO: 1849 - protein, 238 aa, synthetic construct; identical to SEQ ID NO: 52
  REGION 1..238: note = Ab0511 HC Knob Fc-6xHis

SEQ ID NO: 1850 - protein, 5 aa, synthetic construct
  REGION 1..5: note = Ab0511 CDR H1
TYAMN

SEQ ID NO: 1851 - protein, 19 aa, synthetic construct
  REGION 1..19: note = Ab0511 CDR H2
RIRSKYNNYATYYADGFTG

SEQ ID NO: 1852 - protein, 14 aa, synthetic construct
  REGION 1..14: note = Ab0511 CDR H3
HGNFGNSYVSWFAY

SEQ ID NO: 1853 - protein, 14 aa, synthetic construct
  REGION 1..14: note = Ab0511 CDR L1
KSSTGAVTTSNYAN

SEQ ID NO: 1854 - protein, 7 aa, synthetic construct
  REGION 1..7: note = Ab0511 CDR L2
GTNKRAS

SEQ ID NO: 1855 - protein, 9 aa, synthetic construct
  REGION 1..9: note = Ab0511 CDR L3
ALWYSNLWV

SEQ ID NO: 1856 - protein, 482 aa, synthetic construct
  REGION 1..482: note = Ab0512 HC hole scFv-Fc
QVQLVQSGSELKKPGASVKVSCKASGFTFNTYAMNWVRQAPGQGLEWMARIRSKYNNYATYYADGFTGRFVFSRDDSVSTLYLQISSLKAEDTAVYYCVRHGNFGNSYVSWFAYWGQGTLVTVSSGGGGSGGGGSGGGGSEIVVTQSPATLSLSPGERATLSCRSSTGAVTTSNYANWVQQKPGQAFRGLIGGTNKRATGIPARFSGSLSGDDATLTISSLEPEDFAVYYCALWYSNLWVFGQGTKLEIKGGGGSDKTHTCPPCPAPEAAGGPSVFLFPPKPKDTLMISRTPEVTCVVVDVSHEDPEVKFNWYVDGVEVHNAKTKPREEQYNSTYRVVSVLTVLHQDWLNGKEYKCKVSNKALGAPIEKTISKAKGQPREPQVYTLPPIRELMTSNQVSLSCAVKGFYPSDIAVEWESNGQPENNYKTTPPVLDSDGSFFLVSKLTVDKSRWQQGNVFSCSVMHEALHNHYTQKSLSLSPGK

SEQ ID NO: 1857 - protein, 238 aa, synthetic construct; identical to SEQ ID NO: 52
  REGION 1..238: note = Ab0512 HC Knob Fc-6xHis

SEQ ID NO: 1858 - protein, 5 aa, synthetic construct
  REGION 1..5: note = Ab0512 CDR H1
TYAMN

SEQ ID NO: 1859 - protein, 19 aa, synthetic construct
  REGION 1..19: note = Ab0512 CDR H2
RIRSKYNNYATYYADGFTG

SEQ ID NO: 1860 - protein, 14 aa, synthetic construct
  REGION 1..14: note = Ab0512 CDR h3
HGNFGNSYVSWFAY

SEQ ID NO: 1861 - protein, 14 aa, synthetic construct
  REGION 1..14: note = Ab0512 CDR L1
RSSTGAVTTSNYAN

SEQ ID NO: 1862 - protein, 7 aa, synthetic construct
  REGION 1..7: note = Ab0512 CDR L2
GTNKRAT

SEQ ID NO: 1863 - protein, 9 aa, synthetic construct
  REGION 1..9: note = Ab0512 CDR L3
ALWYSNLWV

SEQ ID NO: 1864 - protein, 481 aa, synthetic construct
  REGION 1..481: note = Ab0513 HC Hole scFv-Fc
QVQLVQSGAEVKKPGASVKVSCKASGFTFNTYAMHWVRQAPGQGLEWMARIRSKYNNYATYYADKFQGRVTMTRDDSTSTLYMELSSLRSEDTAVYYCVRHGNFGNSYVSWFAYWGQGTLVTVSSGGGGSGGGGSGGGGSQAVVTQPPSVSAAPGQKVTISCSSSTGAVTTSNYANWVQQLPGTAFKGLIGGTNKRASGIPDRFSGSLSGDSATLGITGLQTGDEADYYCALWYSNLWVFGGGTKLTVLGGGGSDKTHTCPPCPAPEAAGGPSVFLFPPKPKDTLMISRTPEVTCVVVDVSHEDPEVKFNWYVDGVEVHNAKTKPREEQYNSTYRVVSVLTVLHQDWLNGKEYKCKVSNKALGAPIEKTISKAKGQPREPQVYTLPPIRELMTSNQVSLSCAVKGFYPSDIAVEWESNGQPENNYKTTPPVLDSDGSFFLVSKLTVDKSRWQQGNVFSCSVMHEALHNHYTQKSLSLSPGK

SEQ ID NO: 1865 - protein, 238 aa, synthetic construct; identical to SEQ ID NO: 52
  REGION 1..238: note = Ab0513 HC Knob Fc-6xHis

SEQ ID NO: 1866 - protein, 5 aa, synthetic construct
  REGION 1..5: note = Ab0513 CDR H1
TYAMH

SEQ ID NO: 1867 - protein, 19 aa, synthetic construct
  REGION 1..19: note = Ab0513 CDR H2
RIRSKYNNYATYYADKFQG

SEQ ID NO: 1868 - protein, 14 aa, synthetic construct
  REGION 1..14: note = Ab0513 CDR H3
HGNFGNSYVSWFAY

SEQ ID NO: 1869 - protein, 14 aa, synthetic construct
  REGION 1..14: note = Ab0513 CDR L1
SSSTGAVTTSNYAN

SEQ ID NO: 1870 - protein, 7 aa, synthetic construct
  REGION 1..7: note = Ab0513 CDR L2
GTNKRAS

SEQ ID NO: 1871 - protein, 9 aa, synthetic construct
  REGION 1..9: note = Ab0513 CDR L3
ALWYSNLWV

SEQ ID NO: 1872 - protein, 481 aa, synthetic construct
  REGION 1..481: note = Ab0514 HC Hole scFv-Fc
EVQLVESGGGLVQPGGSLRLSCAASGFTFNTYAMNWVRQAPGKGLEWVARIRSKYNNYATYYADSVKGRFTISRDDSKSILYLQMNSLKTEDTAVYYCVRHGNFGNSYVSWFAYWGQGTLVTVSSGGGGSGGGGSGGGGSQAVVTQEPSFSVSPGGTVTLTCGSSTGAVTTSNYANWVQQTPGQAFRGLIGGTNKRASGVPDRFSGSLLGDKAALTITGAQADDESDYYCALWYSNLWVFGGGTKLTVLGGGGSDKTHTCPPCPAPEAAGGPSVFLFPPKPKDTLMISRTPEVTCVVVDVSHEDPEVKFNWYVDGVEVHNAKTKPREEQYNSTYRVVSVLTVLHQDWLNGKEYKCKVSNKALGAPIEKTISKAKGQPREPQVYTLPPIRELMTSNQVSLSCAVKGFYPSDIAVEWESNGQPENNYKTTPPVLDSDGSFFLVSKLTVDKSRWQQGNVFSCSVMHEALHNHYTQKSLSLSPGK

SEQ ID NO: 1873 - protein, 238 aa, synthetic construct; identical to SEQ ID NO: 52
  REGION 1..238: note = Ab0514 HC Knob Fc-6xHis

SEQ ID NO: 1874 - protein, 5 aa, synthetic construct
  REGION 1..5: note = Ab0514 CDR H1
TYAMN

SEQ ID NO: 1875 - protein, 19 aa, synthetic construct
  REGION 1..19: note = Ab0514 CDR H2
RIRSKYNNYATYYADSVKG

SEQ ID NO: 1876 - protein, 14 aa, synthetic construct
  REGION 1..14: note = Ab0514 CDR H3
HGNFGNSYVSWFAY

SEQ ID NO: 1877 - protein, 14 aa, synthetic construct
  REGION 1..14: note = Ab0514 CDR L1
GSSTGAVTTSNYAN

SEQ ID NO: 1878 - protein, 7 aa, synthetic construct
  REGION 1..7: note = Ab0514 CDR L2
GTNKRAS

SEQ ID NO: 1879 - protein, 9 aa, synthetic construct
  REGION 1..9: note = Ab0514 CDR L3
ALWYSNLWV

SEQ ID NO: 1880 - protein, 481 aa, synthetic construct
  REGION 1..481: note = Ab0515 HC Hole scFv-Fc
EVQLVESGGGLVQPGGSLRLSCAASGFTFNTYAMDWVRQAPGKGLEWVARIRSKYNNYATYYADSVKGRFTISRDDSKNSLYLQMNSLKTEDTAVYYCVRHGNFGNSYVSWFAYWGQGTLVTVSSGGGGSGGGGSGGGGSQAVVTQEPSLTVSPGGTVTLTCASSTGAVTTSNYANWVQEKPGQAFRGLIGGTNKRAPWVPARFSGSLIGDKAALTLSGVQPEDEAEYFCALWYSNLWVFGGGTKLTVLGGGGSDKTHTCPPCPAPEAAGGPSVFLFPPKPKDTLMISRTPEVTCVVVDVSHEDPEVKFNWYVDGVEVHNAKTKPREEQYNSTYRVVSVLTVLHQDWLNGKEYKCKVSNKALGAPIEKTISKAKGQPREPQVYTLPPIRELMTSNQVSLSCAVKGFYPSDIAVEWESNGQPENNYKTTPPVLDSDGSFFLVSKLTVDKSRWQQGNVFSCSVMHEALHNHYTQKSLSLSPGK

SEQ ID NO: 1881 - protein, 238 aa, synthetic construct; identical to SEQ ID NO: 52
  REGION 1..238: note = Ab0515 HC Knob Fc-6xHis

SEQ ID NO: 1882 - protein, 5 aa, synthetic construct
  REGION 1..5: note = Ab0515 CDR H1
TYAMD

SEQ ID NO: 1883 - protein, 19 aa, synthetic construct
  REGION 1..19: note = Ab0515 CDR H2
RIRSKYNNYATYYADSVKG

SEQ ID NO: 1884 - protein, 14 aa, synthetic construct
  REGION 1..14: note = Ab0515 CDR H3
HGNFGNSYVSWFAY

SEQ ID NO: 1885 - protein, 14 aa, synthetic construct
  REGION 1..14: note = Ab0515 CDR L1
ASSTGAVTTSNYAN

SEQ ID NO: 1886 - protein, 7 aa, synthetic construct
  REGION 1..7: note = Ab0515 CDR L2
GTNKRAP

SEQ ID NO: 1887 - protein, 9 aa, synthetic construct
  REGION 1..9: note = Ab0515 CDR L3
ALWYSNLWV

SEQ ID NO: 1888 - protein, 482 aa, synthetic construct
  REGION 1..482: note = Ab0516 HC Hole scFv-Fc
EVQLVESGGGLVQPGGSLRLSCAASGFTFNTYAMDWVRQAPGKGLEWVARIRSKYNNYATYYADSVKGRFTISRDDSKNSLYLQMNSLKTEDTAVYYCVRHGNFGNSYVSWFAYWGQGTLVTVSSGGGGSGGGGSGGGGSEIVVTQSPATLSLSPGERATLSCRSSTGAVTTSNYANWVQQKPGQAFRGLIGGTNKRATGIPARFSGSLSGTDFTLTISSLEPEDFAVYYCALWYSNLWVFGQGTKLEIKGGGGSDKTHTCPPCPAPEAAGGPSVFLFPPKPKDTLMISRTPEVTCVVVDVSHEDPEVKFNWYVDGVEVHNAKTKPREEQYNSTYRVVSVLTVLHQDWLNGKEYKCKVSNKALGAPIEKTISKAKGQPREPQVYTLPPIRELMTSNQVSLSCAVKGFYPSDIAVEWESNGQPENNYKTTPPVLDSDGSFFLVSKLTVDKSRWQQGNVFSCSVMHEALHNHYTQKSLSLSPGK

SEQ ID NO: 1889 - protein, 238 aa, synthetic construct; identical to SEQ ID NO: 52
  REGION 1..238: note = Ab0516 HC Knob Fc-6xHis

SEQ ID NO: 1890 - protein, 5 aa, synthetic construct
  REGION 1..5: note = Ab0516 CDR H1
TYAMD

SEQ ID NO: 1891 - protein, 19 aa, synthetic construct
  REGION 1..19: note = Ab0516 CDR H2
RIRSKYNNYATYYADSVKG

SEQ ID NO: 1892 - protein, 14 aa, synthetic construct
  REGION 1..14: note = Ab0516 CDR H3
HGNFGNSYVSWFAY

SEQ ID NO: 1893 - protein, 14 aa, synthetic construct
  REGION 1..14: note = Ab0516 CDR L1
RSSTGAVTTSNYAN

SEQ ID NO: 1894 - protein, 7 aa, synthetic construct
  REGION 1..7: note = Ab0516 CDR L2
GTNKRAT

SEQ ID NO: 1895 - protein, 9 aa, synthetic construct
  REGION 1..9: note = Ab0516 CDR L3
ALWYSNLWV

SEQ ID NO: 1896 - protein, 481 aa, synthetic construct
  REGION 1..481: note = Ab0517 HC Hole scFv-Fc
EVQLVESGGGLVQPGGSLRLSCAASGFTFNTYAMNWVRQAPGKGLEWVARIRSKYNNYATYYADSVKGRFTISRDDSKSILYLQMNSLRAEDTAVYYCVRHGNFGNSYVSWFAYWGQGTLVTVSSGGGGSGGGGSGGGGSQAAVTQPPSASGSPGQSVTISCTSSTGAVTTSNYANWVQQHPGKAFKGMIGGTNKRASGVPDRFSGSLSGDTASLTVSGLQAEDEADYYCALWYSNLWVFGGGTKLTVLGGGGSDKTHTCPPCPAPEAAGGPSVFLFPPKPKDTLMISRTPEVTCVVVDVSHEDPEVKFNWYVDGVEVHNAKTKPREEQYNSTYRVVSVLTVLHQDWLNGKEYKCKVSNKALGAPIEKTISKAKGQPREPQVYTLPPIRELMTSNQVSLSCAVKGFYPSDIAVEWESNGQPENNYKTTPPVLDSDGSFFLVSKLTVDKSRWQQGNVFSCSVMHEALHNHYTQKSLSLSPGK

SEQ ID NO: 1897 - protein, 238 aa, synthetic construct; identical to SEQ ID NO: 52
  REGION 1..238: note = Ab0517 HC Knob Fc-6xHis

SEQ ID NO: 1898 - protein, 5 aa, synthetic construct
  REGION 1..5: note = Ab0517 CDR H1
TYAMN

SEQ ID NO: 1899 - protein, 19 aa, synthetic construct
  REGION 1..19: note = Ab0517 CDR H2
RIRSKYNNYATYYADSVKG

SEQ ID NO: 1900 - protein, 14 aa, synthetic construct
  REGION 1..14: note = Ab0517 CDR H3
HGNFGNSYVSWFAY

SEQ ID NO: 1901 - protein, 14 aa, synthetic construct
  REGION 1..14: note = Ab0517 CDR L1
TSSTGAVTTSNYAN

SEQ ID NO: 1902 - protein, 7 aa, synthetic construct
  REGION 1..7: note = Ab0517 CDR L2
GTNKRAS

SEQ ID NO: 1903 - protein, 9 aa, synthetic construct
  REGION 1..9: note = Ab0517 CDR L3
ALWYSNLWV

SEQ ID NO: 1904 - protein, 481 aa, synthetic construct
  REGION 1..481: note = Ab0518 HC Hole scFv-Fc
EVQLVESGGGLVQPGGSLRLSCAASGFTFNTYAMSWVRQAPGKGLEWVARIRSKYNNYATYYADSVKGRFTISRDDSKNTLYLQMNSLRAEDTAVYYCVRHGNFGNSYVSWFAYWGQGTLVTVSSGGGGSGGGGSGGGGSQAVVTQEPSLTVSPGGTVTLTCASSTGAVTTSNYANWVQQKPGQAFRGLIGGTNKKASWTPARFSGSLLGTDFALTLSGVQPEDEAEYYCALWYSNLWVFGGGTKLTVLGGGGSDKTHTCPPCPAPEAAGGPSVFLFPPKPKDTLMISRTPEVTCVVVDVSHEDPEVKFNWYVDGVEVHNAKTKPREEQYNSTYRVVSVLTVLHQDWLNGKEYKCKVSNKALGAPIEKTISKAKGQPREPQVYTLPPIRELMTSNQVSLSCAVKGFYPSDIAVEWESNGQPENNYKTTPPVLDSDGSFFLVSKLTVDKSRWQQGNVFSCSVMHEALHNHYTQKSLSLSPGK

SEQ ID NO: 1905 - protein, 238 aa, synthetic construct; identical to SEQ ID NO: 52
  REGION 1..238: note = Ab0518 HC Knob Fc-6xHis

SEQ ID NO: 1906 - protein, 5 aa, synthetic construct
  REGION 1..5: note = Ab0518 CDR H1
TYAMS

SEQ ID NO: 1907 - protein, 19 aa, synthetic construct
  REGION 1..19: note = Ab0518 CDR H2
RIRSKYNNYATYYADSVKG

SEQ ID NO: 1908 - protein, 14 aa, synthetic construct
  REGION 1..14: note = Ab0518 CDR H3
HGNFGNSYVSWFAY

SEQ ID NO: 1909 - protein, 14 aa, synthetic construct
  REGION 1..14: note = Ab0518 CDR L1
ASSTGAVTTSNYAN

SEQ ID NO: 1910 - protein, 7 aa, synthetic construct
  REGION 1..7: note = Ab0518 CDR L2
GTNKKAS

SEQ ID NO: 1911 - protein, 9 aa, synthetic construct
  REGION 1..9: note = Ab0518 CDR L3
ALWYSNLWV

SEQ ID NO: 1912 - protein, 481 aa, synthetic construct
  REGION 1..481: note = Ab0519 HC Hole scFv-Fc
EVQLVESGSELKKPGASVKVSCKASGFTFNTYAMNWVRQAPGQGLEWVARIRSKYNNYATYYADGFTGRFVISRDDSVSILYLQISSLKAEDTAVYYCVRHGNFGNSYVSWFAYWGQGTLVTVSSGGGGSGGGGSGGGGSQAVVTQEPSLTVSPGGTVTLTCASSTGAVTTSNYANWVQQKPGQAFRGLIGGTNKKASWTPARFSGSLLGTDFALTLSGVQPEDEAEYYCALWYSNLWVFGGGTKLTVLGGGGSDKTHTCPPCPAPEAAGGPSVFLFPPKPKDTLMISRTPEVTCVVVDVSHEDPEVKFNWYVDGVEVHNAKTKPREEQYNSTYRVVSVLTVLHQDWLNGKEYKCKVSNKALGAPIEKTISKAKGQPREPQVYTLPPIRELMTSNQVSLSCAVKGFYPSDIAVEWESNGQPENNYKTTPPVLDSDGSFFLVSKLTVDKSRWQQGNVFSCSVMHEALHNHYTQKSLSLSPGK

SEQ ID NO: 1913 - protein, 238 aa, synthetic construct; identical to SEQ ID NO: 52
  REGION 1..238: note = Ab0519 HC Knob Fc-6xHis

SEQ ID NO: 1914 - protein, 5 aa, synthetic construct
  REGION 1..5: note = Ab0519 CDR H1
TYAMN

SEQ ID NO: 1915 - protein, 19 aa, synthetic construct
  REGION 1..19: note = Ab0519 CDR H2
RIRSKYNNYATYYADGFTG

SEQ ID NO: 1916 - protein, 14 aa, synthetic construct
  REGION 1..14: note = Ab0519 CDR H3
HGNFGNSYVSWFAY

SEQ ID NO: 1917 - protein, 14 aa, synthetic construct
  REGION 1..14: note = Ab0519 CDR L1
ASSTGAVTTSNYAN

SEQ ID NO: 1918 - protein, 7 aa, synthetic construct
  REGION 1..7: note = Ab0519 CDR L2
GTNKKAS

SEQ ID NO: 1919 - protein, 9 aa, synthetic construct
  REGION 1..9: note = Ab0519 CDR L3
ALWYSNLWV

SEQ ID NO: 1920 - protein, 481 aa, synthetic construct
  REGION 1..481: note = Ab0520 HC Hole scFv-Fc
QVQLVQSGSELKKPGASVKVSCKASGFTFNTYAMNWVRQAPGQGLEWMARIRSKYNNYATYYADGFTGRFVFSRDDSVSTLYLQISSLKAEDTAVYYCVRHGNFGNSYVSWFAYWGQGTLVTVSSGGGGSGGGGSGGGGSQAVVTQEPSLTVSPGGTVTLTCASSTGAVTTSNYANWVQEKPGQAFRGLIGGTNKRAPWVPARFSGSLIGDKAALTLSGVQPEDEAEYFCALWYSNLWVFGGGTKLTVLGGGGSDKTHTCPPCPAPEAAGGPSVFLFPPKPKDTLMISRTPEVTCVVVDVSHEDPEVKFNWYVDGVEVHNAKTKPREEQYNSTYRVVSVLTVLHQDWLNGKEYKCKVSNKALGAPIEKTISKAKGQPREPQVYTLPPIRELMTSNQVSLSCAVKGFYPSDIAVEWESNGQPENNYKTTPPVLDSDGSFFLVSKLTVDKSRWQQGNVFSCSVMHEALHNHYTQKSLSLSPGK

SEQ ID NO: 1921 - protein, 238 aa, synthetic construct; identical to SEQ ID NO: 52
  REGION 1..238: note = Ab0520 HC Knob Fc-6xHis

SEQ ID NO: 1922 - protein, 5 aa, synthetic construct
  REGION 1..5: note = Ab0520 CDR H1
TYAMN

SEQ ID NO: 1923 - protein, 19 aa, synthetic construct
  REGION 1..19: note = Ab0520 CDR H2
RIRSKYNNYATYYADGFTG

SEQ ID NO: 1924 - protein, 14 aa, synthetic construct
  REGION 1..14: note = Ab0520 CDR H3
HGNFGNSYVSWFAY

SEQ ID NO: 1925 - protein, 14 aa, synthetic construct
  REGION 1..14: note = Ab0520 CDR L1
ASSTGAVTTSNYAN

SEQ ID NO: 1926 - protein, 7 aa, synthetic construct
  REGION 1..7: note = Ab0520 CDR L2
GTNKRAP

SEQ ID NO: 1927 - protein, 9 aa, synthetic construct
  REGION 1..9: note = Ab0520 CDR L3
ALWYSNLWV

SEQ ID NO: 1928 - protein, 482 aa, synthetic construct
  REGION 1..482: note = Ab0521 HC Hole scFv-Fc
QVQLVQSGSELKKPGASVKVSCKASGFTFNTYAMNWVRQAPGQGLEWMARIRSKYNNYATYYADGFTGRFVFSRDDSVSTLYLQISSLKAEDTAVYYCVRHGNFGNSYVSWFAYWGQGTLVTVSSGGGGSGGGGSGGGGSEIVVTQSPATLSLSPGERATLSCRSSTGAVTTSNYANWVQQKPGQAFRGLIGGTNKRATGIPARFSGSLSGTDFTLTISSLEPEDFAVYYCALWYSNLWVFGQGTKLEIKGGGGSDKTHTCPPCPAPEAAGGPSVFLFPPKPKDTLMISRTPEVTCVVVDVSHEDPEVKFNWYVDGVEVHNAKTKPREEQYNSTYRVVSVLTVLHQDWLNGKEYKCKVSNKALGAPIEKTISKAKGQPREPQVYTLPPIRELMTSNQVSLSCAVKGFYPSDIAVEWESNGQPENNYKTTPPVLDSDGSFFLVSKLTVDKSRWQQGNVFSCSVMHEALHNHYTQKSLSLSPGK

SEQ ID NO: 1929 - protein, 238 aa, synthetic construct; identical to SEQ ID NO: 52
  REGION 1..238: note = Ab0521 HC Knob Fc-6xHis

SEQ ID NO: 1930 - protein, 5 aa, synthetic construct
  REGION 1..5: note = Ab0521 CDR H1
TYAMN

SEQ ID NO: 1931 - protein, 19 aa, synthetic construct
  REGION 1..19: note = Ab0521 CDR H2
RIRSKYNNYATYYADGFTG

SEQ ID NO: 1932 - protein, 14 aa, synthetic construct
  REGION 1..14: note = Ab0521 CDR H3
HGNFGNSYVSWFAY

SEQ ID NO: 1933 - protein, 14 aa, synthetic construct
  REGION 1..14: note = Ab0521 CDR L1
RSSTGAVTTSNYAN

SEQ ID NO: 1934 - protein, 7 aa, synthetic construct
  REGION 1..7: note = Ab0521 CDR L2
GTNKRAT

SEQ ID NO: 1935 - protein, 9 aa, synthetic construct
  REGION 1..9: note = Ab0521 CDR L3
ALWYSNLWV

SEQ ID NO: 1936 - protein, 481 aa, synthetic construct
  REGION 1..481: note = Ab0522 HC Hole scFv-Fc
QVQLVQSGAEVKKPGASVKVSCKASGFTFNTYAMHWVRQAPGQGLEWMARIRSKYNNYATYYADKFQGRVTMTRDDSTSTLYMELSSLRSEDTAVYYCVRHGNFGNSYVSWFAYWGQGTLVTVSSGGGGSGGGGSGGGGSQAAVTQPPSASGSPGQSVTISCTSSTGAVTTSNYANWVQQHPGKAFKGMIGGTNKRASGVPDRFSGSLSGDTASLTVSGLQAEDEADYYCALWYSNLWVFGGGTKLTVLGGGGSDKTHTCPPCPAPEAAGGPSVFLFPPKPKDTLMISRTPEVTCVVVDVSHEDPEVKFNWYVDGVEVHNAKTKPREEQYNSTYRVVSVLTVLHQDWLNGKEYKCKVSNKALGAPIEKTISKAKGQPREPQVYTLPPIRELMTSNQVSLSCAVKGFYPSDIAVEWESNGQPENNYKTTPPVLDSDGSFFLVSKLTVDKSRWQQGNVFSCSVMHEALHNHYTQKSLSLSPGK

SEQ ID NO: 1937 - protein, 238 aa, synthetic construct; identical to SEQ ID NO: 52
  REGION 1..238: note = Ab0522 HC Knob Fc-6xHis

SEQ ID NO: 1938 - protein, 5 aa, synthetic construct
  REGION 1..5: note = Ab0522 CDR H1
TYAMH

SEQ ID NO: 1939 - protein, 19 aa, synthetic construct
  REGION 1..19: note = Ab0522 CDR H2
RIRSKYNNYATYYADKFQG

SEQ ID NO: 1940 - protein, 14 aa, synthetic construct
  REGION 1..14: note = Ab0522 CDR H3
HGNFGNSYVSWFAY

SEQ ID NO: 1941 - protein, 14 aa, synthetic construct
  REGION 1..14: note = Ab0522 CDR L1
TSSTGAVTTSNYAN

SEQ ID NO: 1942 - protein, 7 aa, synthetic construct
  REGION 1..7: note = Ab0522 CDR L2
GTNKRAS

SEQ ID NO: 1943 - protein, 9 aa, synthetic construct
  REGION 1..9: note = Ab0522 CDR L3
ALWYSNLWV

SEQ ID NO: 1944 - protein, 481 aa, synthetic construct
  REGION 1..481: note = Ab0523 HC Hole scFv-Fc
EVQLVESGGGLVQPGGSLRLSCAASGFTFNTYAMNWVRQAPGKGLEWVARIRSKYNNYATYYADSVKGRFTISRDDSKSILYLQMNSLKTEDTAVYYCVRHGNFGNSYVSWFAYWGQGTLVTVSSGGGGSGGGGSGGGGSQAVVTQPPSVSAAPGQKVTISCSSSTGAVTTSNYANWVQQLPGTAFKGLIGGTNKRASGIPDRFSGSLSGDSATLGITGLQTGDEADYYCALWYSNLWVFGGGTKLTVLGGGGSDKTHTCPPCPAPEAAGGPSVFLFPPKPKDTLMISRTPEVTCVVVDVSHEDPEVKFNWYVDGVEVHNAKTKPREEQYNSTYRVVSVLTVLHQDWLNGKEYKCKVSNKALGAPIEKTISKAKGQPREPQVYTLPPIRELMTSNQVSLSCAVKGFYPSDIAVEWESNGQPENNYKTTPPVLDSDGSFFLVSKLTVDKSRWQQGNVFSCSVMHEALHNHYTQKSLSLSPGK

SEQ ID NO: 1945 - protein, 238 aa, synthetic construct; identical to SEQ ID NO: 52
  REGION 1..238: note = Ab0523 HC Knob Fc-6xHis

SEQ ID NO: 1946 - protein, 5 aa, synthetic construct
  REGION 1..5: note = Ab0523 CDR H1
TYAMN

SEQ ID NO: 1947 - protein, 19 aa, synthetic construct
  REGION 1..19: note = Ab0523 CDR H2
RIRSKYNNYATYYADSVKG

SEQ ID NO: 1948 - protein, 14 aa, synthetic construct
  REGION 1..14: note = Ab0523 CDR H3
HGNFGNSYVSWFAY

SEQ ID NO: 1949 - protein, 14 aa, synthetic construct
  REGION 1..14: note = Ab0523 CDR L1
SSSTGAVTTSNYAN

SEQ ID NO: 1950 - protein, 7 aa, synthetic construct
  REGION 1..7: note = Ab0523 CDR L2
GTNKRAS

SEQ ID NO: 1951 - protein, 9 aa, synthetic construct
  REGION 1..9: note = Ab0523 CDR L3
ALWYSNLWV

SEQ ID NO: 1952 - protein, 481 aa, synthetic construct
  REGION 1..481: note = Ab0524 HC Hole scFv-Fc
EVQLVESGGGLVQPGGSLRLSCAASGFTFNTYAMDWVRQAPGKGLEWVARIRSKYNNYATYYADSVKGRFTISRDDSKNSLYLQMNSLKTEDTAVYYCVRHGNFGNSYVSWFAYWGQGTLVTVSSGGGGSGGGGSGGGGSQAVVTQEPSLTVSPGGTVTLTCASSTGAVTTSNYANWVQQKPGQAFRGLIGGTNKKASWTPARFSGSLLGDKAALTLSGVQPEDEAEYYCALWYSNLWVFGGGTKLTVLGGGGSDKTHTCPPCPAPEAAGGPSVFLFPPKPKDTLMISRTPEVTCVVVDVSHEDPEVKFNWYVDGVEVHNAKTKPREEQYNSTYRVVSVLTVLHQDWLNGKEYKCKVSNKALGAPIEKTISKAKGQPREPQVYTLPPIRELMTSNQVSLSCAVKGFYPSDIAVEWESNGQPENNYKTTPPVLDSDGSFFLVSKLTVDKSRWQQGNVFSCSVMHEALHNHYTQKSLSLSPGK

SEQ ID NO: 1953 - protein, 238 aa, synthetic construct; identical to SEQ ID NO: 52
  REGION 1..238: note = Ab0524 HC Knob Fc-6xHis

SEQ ID NO: 1954 - protein, 5 aa, synthetic construct
  REGION 1..5: note = Ab0524 CDR H1
TYAMD

SEQ ID NO: 1955 - protein, 19 aa, synthetic construct
  REGION 1..19: note = Ab0524 CDR H2
RIRSKYNNYATYYADSVKG

SEQ ID NO: 1956 - protein, 14 aa, synthetic construct
  REGION 1..14: note = Ab0524 CDR H3
HGNFGNSYVSWFAY

SEQ ID NO: 1957 - protein, 14 aa, synthetic construct
  REGION 1..14: note = Ab0524 CDR L1
ASSTGAVTTSNYAN

SEQ ID NO: 1958 - protein, 7 aa, synthetic construct
  REGION 1..7: note = Ab0524 CDR L2
GTNKKAS

SEQ ID NO: 1959 - protein, 9 aa, synthetic construct
  REGION 1..9: note = Ab0524 CDR L3
ALWYSNLWV

SEQ ID NO: 1960 - protein, 482 aa, synthetic construct
  REGION 1..482: note = Ab0525 HC Hole scFv-Fc
EVQLVESGGGLVQPGGSLRLSCAASGFTFNTYAMDWVRQAPGKGLEWVARIRSKYNNYATYYADSVKGRFTISRDDSKNSLYLQMNSLKTEDTAVYYCVRHGNFGNSYVSWFAYWGQGTLVTVSSGGGGSGGGGSGGGGSDIQVTQSPSSLSASVGDRVTITCRSSTGAVTTSNYANWVQQKPGKAFKGLIGGTNKLASGVPSRFSGSLSGDDATLTISSLQPEDFATYYCALWYSNLWVFGQGTKLEIKGGGGSDKTHTCPPCPAPEAAGGPSVFLFPPKPKDTLMISRTPEVTCVVVDVSHEDPEVKFNWYVDGVEVHNAKTKPREEQYNSTYRVVSVLTVLHQDWLNGKEYKCKVSNKALGAPIEKTISKAKGQPREPQVYTLPPIRELMTSNQVSLSCAVKGFYPSDIAVEWESNGQPENNYKTTPPVLDSDGSFFLVSKLTVDKSRWQQGNVFSCSVMHEALHNHYTQKSLSLSPGK

SEQ ID NO: 1961 - protein, 238 aa, synthetic construct; identical to SEQ ID NO: 52
  REGION 1..238: note = Ab0525 HC Knob Fc-6xHis

SEQ ID NO: 1962 - protein, 5 aa, synthetic construct
  REGION 1..5: note = Ab0525 CDR H1
TYAMD

SEQ ID NO: 1963 - protein, 19 aa, synthetic construct
  REGION 1..19: note = Ab0525 CDR H2
RIRSKYNNYATYYADSVKG

SEQ ID NO: 1964 - protein, 14 aa, synthetic construct
  REGION 1..14: note = Ab0525 CDR H3
HGNFGNSYVSWFAY

SEQ ID NO: 1965 - protein, 14 aa, synthetic construct
  REGION 1..14: note = Ab0525 CDR L1
RSSTGAVTTSNYAN

SEQ ID NO: 1966 - protein, 7 aa, synthetic construct
  REGION 1..7: note = Ab0525 L2
GTNKLAS

SEQ ID NO: 1967 - protein, 9 aa, synthetic construct
  REGION 1..9: note = Ab0525 CDR L3
ALWYSNLWV

SEQ ID NO: 1968 - protein, 482 aa, synthetic construct
  REGION 1..482: note = Ab0526 HC Hole scFv-Fc
EVQLVESGGGLVQPGGSLRLSCAASGFTFNTYAMNWVRQAPGKGLEWVARIRSKYNNYATYYADSVKGRFTISRDDSKSILYLQMNSLRAEDTAVYYCVRHGNFGNSYVSWFAYWGQGTLVTVSSGGGGSGGGGSGGGGSEIVVTQSPATLSLSPGERATLSCRSSTGAVTTSNYANWVQEKPGQAFRGLIGGTNKRAPGVPARFSGSLIGTDFTLTISSLEPEDFAVYFCALWYSNLWVFGQGTKLEIKGGGGSDKTHTCPPCPAPEAAGGPSVFLFPPKPKDTLMISRTPEVTCVVVDVSHEDPEVKFNWYVDGVEVHNAKTKPREEQYNSTYRVVSVLTVLHQDWLNGKEYKCKVSNKALGAPIEKTISKAKGQPREPQVYTLPPIRELMTSNQVSLSCAVKGFYPSDIAVEWESNGQPENNYKTTPPVLDSDGSFFLVSKLTVDKSRWQQGNVFSCSVMHEALHNHYTQKSLSLSPGK

SEQ ID NO: 1969 - protein, 238 aa, synthetic construct; identical to SEQ ID NO: 52
  REGION 1..238: note = Ab0526 HC Knob Fc-6xHis

SEQ ID NO: 1970 - protein, 5 aa, synthetic construct
  REGION 1..5: note = Ab0526 CDR H1
TYAMN

SEQ ID NO: 1971 - protein, 19 aa, synthetic construct
  REGION 1..19: note = Ab0526 CDR H2
RIRSKYNNYATYYADSVKG

SEQ ID NO: 1972 - protein, 14 aa, synthetic construct
  REGION 1..14: note = Ab0526 CDR H3
HGNFGNSYVSWFAY

SEQ ID NO: 1973 - protein, 14 aa, synthetic construct
  REGION 1..14: note = Ab0526 CDR L1
RSSTGAVTTSNYAN

SEQ ID NO: 1974 - protein, 7 aa, synthetic construct
  REGION 1..7: note = Ab0526 CDR L2
GTNKRAP

SEQ ID NO: 1975 - protein, 9 aa, synthetic construct
  REGION 1..9: note = Ab0526 CDR L3
ALWYSNLWV

SEQ ID NO: 1976 - protein, 481 aa, synthetic construct
  REGION 1..481: note = Ab0527 HC Hole scFv-Fc
EVQLVESGGGLVQPGGSLRLSCAASGFTFNTYAMSWVRQAPGKGLEWVARIRSKYNNYATYYADSVKGRFTISRDDSKNTLYLQMNSLRAEDTAVYYCVRHGNFGNSYVSWFAYWGQGTLVTVSSGGGGSGGGGSGGGGSQAVVTQEPSFSVSPGGTVTLTCGSSTGAVTTSNYANWVQQTPGQAFRGLIGGTNKRASGVPDRFSGSLLGDKAALTITGAQADDESDYYCALWYSNLWVFGGGTKLTVLGGGGSDKTHTCPPCPAPEAAGGPSVFLFPPKPKDTLMISRTPEVTCVVVDVSHEDPEVKFNWYVDGVEVHNAKTKPREEQYNSTYRVVSVLTVLHQDWLNGKEYKCKVSNKALGAPIEKTISKAKGQPREPQVYTLPPIRELMTSNQVSLSCAVKGFYPSDIAVEWESNGQPENNYKTTPPVLDSDGSFFLVSKLTVDKSRWQQGNVFSCSVMHEALHNHYTQKSLSLSPGK

SEQ ID NO: 1977 - protein, 238 aa, synthetic construct; identical to SEQ ID NO: 52
  REGION 1..238: note = Ab0527 HC Knob Fc-6xHis

SEQ ID NO: 1978 - protein, 5 aa, synthetic construct
  REGION 1..5: note = Ab0527 CDR H1
TYAMS

SEQ ID NO: 1979 - protein, 19 aa, synthetic construct
  REGION 1..19: note = Ab0527 CDR H2
RIRSKYNNYATYYADSVKG

SEQ ID NO: 1980 - protein, 14 aa, synthetic construct
  REGION 1..14: note = Ab0527 CDR H3
HGNFGNSYVSWFAY

SEQ ID NO: 1981 - protein, 14 aa, synthetic construct
  REGION 1..14: note = Ab0527 CDR L1
GSSTGAVTTSNYAN

SEQ ID NO: 1982 - protein, 7 aa, synthetic construct
  REGION 1..7: note = Ab0527 CDR L2
GTNKRAS

SEQ ID NO: 1983 - protein, 9 aa, synthetic construct
  REGION 1..9: note = Ab0527 CDR L3
ALWYSNLWV

SEQ ID NO: 1984 - protein, 481 aa, synthetic construct
  REGION 1..481: note = Ab0528 HC Hole scFv-Fc
EVQLVESGSELKKPGASVKVSCKASGFTFNTYAMNWVRQAPGQGLEWVARIRSKYNNYATYYADGFTGRFVISRDDSVSILYLQISSLKAEDTAVYYCVRHGNFGNSYVSWFAYWGQGTLVTVSSGGGGSGGGGSGGGGSQAVVTQEPSFSVSPGGTVTLTCGSSTGAVTTSNYANWVQQTPGQAFRGLIGGTNKRASGVPDRFSGSLLGDKAALTITGAQADDESDYYCALWYSNLWVFGGGTKLTVLGGGGSDKTHTCPPCPAPEAAGGPSVFLFPPKPKDTLMISRTPEVTCVVVDVSHEDPEVKFNWYVDGVEVHNAKTKPREEQYNSTYRVVSVLTVLHQDWLNGKEYKCKVSNKALGAPIEKTISKAKGQPREPQVYTLPPIRELMTSNQVSLSCAVKGFYPSDIAVEWESNGQPENNYKTTPPVLDSDGSFFLVSKLTVDKSRWQQGNVFSCSVMHEALHNHYTQKSLSLSPGK

SEQ ID NO: 1985 - protein, 238 aa, synthetic construct; identical to SEQ ID NO: 52
  REGION 1..238: note = Ab0528 HC Knob Fc-6xHis

SEQ ID NO: 1986 - protein, 5 aa, synthetic construct
  REGION 1..5: note = Ab0528 CDR H1
TYAMN

SEQ ID NO: 1987 - protein, 19 aa, synthetic construct
  REGION 1..19: note = Ab0528 CDR H2
RIRSKYNNYATYYADGFTG

SEQ ID NO: 1988 - protein, 14 aa, synthetic construct
  REGION 1..14: note = Ab0528 CDR H3
HGNFGNSYVSWFAY

SEQ ID NO: 1989 - protein, 14 aa, synthetic construct
  REGION 1..14: note = Ab0528 CDR L1
GSSTGAVTTSNYAN

SEQ ID NO: 1990 - protein, 7 aa, synthetic construct
  REGION 1..7: note = Ab0528 CDR L2
GTNKRAS

SEQ ID NO: 1991 - protein, 9 aa, synthetic construct
  REGION 1..9: note = Ab0528 CDR L3
ALWYSNLWV

SEQ ID NO: 1992 - protein, 481 aa, synthetic construct
  REGION 1..481: note = Ab0529 HC Hole scFv-Fc
QVQLVQSGSELKKPGASVKVSCKASGFTFNTYAMNWVRQAPGQGLEWMARIRSKYNNYATYYADGFTGRFVFSRDDSVSTLYLQISSLKAEDTAVYYCVRHGNFGNSYVSWFAYWGQGTLVTVSSGGGGSGGGGSGGGGSQAVVTQEPSLTVSPGGTVTLTCASSTGAVTTSNYANWVQQKPGQAFRGLIGGTNKKASWTPARFSGSLLGDKAALTLSGVQPEDEAEYYCALWYSNLWVFGGGTKLTVLGGGGSDKTHTCPPCPAPEAAGGPSVFLFPPKPKDTLMISRTPEVTCVVVDVSHEDPEVKFNWYVDGVEVHNAKTKPREEQYNSTYRVVSVLTVLHQDWLNGKEYKCKVSNKALGAPIEKTISKAKGQPREPQVYTLPPIRELMTSNQVSLSCAVKGFYPSDIAVEWESNGQPENNYKTTPPVLDSDGSFFLVSKLTVDKSRWQQGNVFSCSVMHEALHNHYTQKSLSLSPGK

SEQ ID NO: 1993 - protein, 238 aa, synthetic construct; identical to SEQ ID NO: 52
  REGION 1..238: note = Ab0529 HC Knob Fc-6xHis

SEQ ID NO: 1994 - protein, 5 aa, synthetic construct
  REGION 1..5: note = Ab0529 CDR H1
TYAMN

SEQ ID NO: 1995 - protein, 19 aa, synthetic construct
  REGION 1..19: note = Ab0529 CDR H2
RIRSKYNNYATYYADGFTG

SEQ ID NO: 1996 - protein, 14 aa, synthetic construct
  REGION 1..14: note = Ab0529 CDR H3
HGNFGNSYVSWFAY

SEQ ID NO: 1997 - protein, 14 aa, synthetic construct
  REGION 1..14: note = Ab0529 CDR L1
ASSTGAVTTSNYAN

SEQ ID NO: 1998 - protein, 7 aa, synthetic construct
  REGION 1..7: note = Ab0529 CDR L2
GTNKKAS

SEQ ID NO: 1999 - protein, 9 aa, synthetic construct
  REGION 1..9: note = Ab0529 CDR L3
ALWYSNLWV

SEQ ID NO: 2000 - protein, 482 aa, synthetic construct
  REGION 1..482: note = Ab0530 HC Hole scFv-Fc
QVQLVQSGSELKKPGASVKVSCKASGFTFNTYAMNWVRQAPGQGLEWMARIRSKYNNYATYYADGFTGRFVFSRDDSVSTLYLQISSLKAEDTAVYYCVRHGNFGNSYVSWFAYWGQGTLVTVSSGGGGSGGGGSGGGGSDIQVTQSPSSLSASVGDRVTITCRSSTGAVTTSNYANWVQQKPGKAFKGLIGGTNKLASGVPSRFSGSLSGDDATLTISSLQPEDFATYYCALWYSNLWVFGQGTKLEIKGGGGSDKTHTCPPCPAPEAAGGPSVFLFPPKPKDTLMISRTPEVTCVVVDVSHEDPEVKFNWYVDGVEVHNAKTKPREEQYNSTYRVVSVLTVLHQDWLNGKEYKCKVSNKALGAPIEKTISKAKGQPREPQVYTLPPIRELMTSNQVSLSCAVKGFYPSDIAVEWESNGQPENNYKTTPPVLDSDGSFFLVSKLTVDKSRWQQGNVFSCSVMHEALHNHYTQKSLSLSPGK

SEQ ID NO: 2001 - protein, 238 aa, synthetic construct; identical to SEQ ID NO: 52
  REGION 1..238: note = Ab0530 HC Knob Fc-6xHis

SEQ ID NO: 2002 - protein, 5 aa, synthetic construct
  REGION 1..5: note = Ab0530 CDR H1
TYAMN

SEQ ID NO: 2003 - protein, 19 aa, synthetic construct
  REGION 1..19: note = Ab0530 CDR H2
RIRSKYNNYATYYADGFTG

SEQ ID NO: 2004 - protein, 14 aa, synthetic construct
  REGION 1..14: note = Ab0530 CDR H3
HGNFGNSYVSWFAY

SEQ ID NO: 2005 - protein, 14 aa, synthetic construct
  REGION 1..14: note = Ab0530 CDR L1
RSSTGAVTTSNYAN

SEQ ID NO: 2006 - protein, 7 aa, synthetic construct
  REGION 1..7: note = Ab0530 CDR L2
GTNKLAS

SEQ ID NO: 2007 - protein, 9 aa, synthetic construct
  REGION 1..9: note = Ab0530 CDR L3
ALWYSNLWV

SEQ ID NO: 2008 - protein, 482 aa, synthetic construct
  REGION 1..482: note = Ab0531 HC Hole scFv-Fc
QVQLVQSGAEVKKPGASVKVSCKASGFTFNTYAMHWVRQAPGQGLEWMARIRSKYNNYATYYADKFQGRVTMTRDDSTSTLYMELSSLRSEDTAVYYCVRHGNFGNSYVSWFAYWGQGTLVTVSSGGGGSGGGGSGGGGSEIVVTQSPATLSLSPGERATLSCRSSTGAVTTSNYANWVQEKPGQAFRGLIGGTNKRAPGVPARFSGSLIGTDFTLTISSLEPEDFAVYFCALWYSNLWVFGQGTKLEIKGGGGSDKTHTCPPCPAPEAAGGPSVFLFPPKPKDTLMISRTPEVTCVVVDVSHEDPEVKFNWYVDGVEVHNAKTKPREEQYNSTYRVVSVLTVLHQDWLNGKEYKCKVSNKALGAPIEKTISKAKGQPREPQVYTLPPIRELMTSNQVSLSCAVKGFYPSDIAVEWESNGQPENNYKTTPPVLDSDGSFFLVSKLTVDKSRWQQGNVFSCSVMHEALHNHYTQKSLSLSPGK

SEQ ID NO: 2009 - protein, 238 aa, synthetic construct; identical to SEQ ID NO: 52
  REGION 1..238: note = Ab0531 HC knob Fc-6xHis

SEQ ID NO: 2010 - protein, 5 aa, synthetic construct
  REGION 1..5: note = Ab0531 CDR H1
TYAMH

SEQ ID NO: 2011 - protein, 19 aa, synthetic construct
  REGION 1..19: note = Ab0531 CDR H2
RIRSKYNNYATYYADKFQG

SEQ ID NO: 2012 - protein, 14 aa, synthetic construct
  REGION 1..14: note = Ab0531 CDR H3
HGNFGNSYVSWFAY

SEQ ID NO: 2013 - protein, 14 aa, synthetic construct
  REGION 1..14: note = Ab0531 CDR L1
RSSTGAVTTSNYAN

SEQ ID NO: 2014 - protein, 7 aa, synthetic construct
  REGION 1..7: note = Ab0531 CDR L2
GTNKRAP

SEQ ID NO: 2015 - protein, 9 aa, synthetic construct
  REGION 1..9: note = Ab0531 CDR L3
ALWYSNLWV

SEQ ID NO: 2016 - protein, 481 aa, synthetic construct
  REGION 1..481: note = Ab0532 HC Hole scFv-Fc
EVQLVESGGGLVQPGGSLRLSCAASGFTFNTYAMNWVRQAPGKGLEWVARIRSKYNNYATYYADSVKGRFTISRDDSKSILYLQMNSLKTEDTAVYYCVRHGNFGNSYVSWFAYWGQGTLVTVSSGGGGSGGGGSGGGGSQAAVTQPPSASGSPGQSVTISCTSSTGAVTTSNYANWVQQHPGKAFKGMIGGTNKRASGVPDRFSGSLSGDTASLTVSGLQAEDEADYYCALWYSNLWVFGGGTKLTVLGGGGSDKTHTCPPCPAPEAAGGPSVFLFPPKPKDTLMISRTPEVTCVVVDVSHEDPEVKFNWYVDGVEVHNAKTKPREEQYNSTYRVVSVLTVLHQDWLNGKEYKCKVSNKALGAPIEKTISKAKGQPREPQVYTLPPIRELMTSNQVSLSCAVKGFYPSDIAVEWESNGQPENNYKTTPPVLDSDGSFFLVSKLTVDKSRWQQGNVFSCSVMHEALHNHYTQKSLSLSPGK

SEQ ID NO: 2017 - protein, 238 aa, synthetic construct; identical to SEQ ID NO: 52
  REGION 1..238: note = Ab0532 HC Knob Fc-6xHis

SEQ ID NO: 2018 - protein, 5 aa, synthetic construct
  REGION 1..5: note = Ab0532 CDR H1
TYAMN

SEQ ID NO: 2019 - protein, 19 aa, synthetic construct
  REGION 1..19: note = Ab0532 CDR H2
RIRSKYNNYATYYADSVKG

SEQ ID NO: 2020 - protein, 14 aa, synthetic construct
  REGION 1..14: note = Ab0532 CDR H3
HGNFGNSYVSWFAY

SEQ ID NO: 2021 - protein, 14 aa, synthetic construct
  REGION 1..14: note = Ab0532 CDR L1
TSSTGAVTTSNYAN

SEQ ID NO: 2022 - protein, 7 aa, synthetic construct
  REGION 1..7: note = Ab0532 CDR L2
GTNKRAS

SEQ ID NO: 2023 - protein, 9 aa, synthetic construct
  REGION 1..9: note = Ab0532 CDR L3
ALWYSNLWV

SEQ ID NO: 2024 - protein, 481 aa, synthetic construct
  REGION 1..481: note = Ab0533 HC Hole scFv-Fc
EVQLVESGGGLVQPGGSLRLSCAASGFTFNTYAMDWVRQAPGKGLEWVARIRSKYNNYATYYADSVKGRFTISRDDSKNSLYLQMNSLKTEDTAVYYCVRHGNFGNSYVSWFAYWGQGTLVTVSSGGGGSGGGGSGGGGSQAVVTQEPSLTVSPGGTVTLTCASSTGAVTTSNYANWVQQKPGQAFRGLIGGTNKKASWTPARFSGSLLGTDFALTLSGVQPEDEAEYYCALWYSNLWVFGGGTKLTVLGGGGSDKTHTCPPCPAPEAAGGPSVFLFPPKPKDTLMISRTPEVTCVVVDVSHEDPEVKFNWYVDGVEVHNAKTKPREEQYNSTYRVVSVLTVLHQDWLNGKEYKCKVSNKALGAPIEKTISKAKGQPREPQVYTLPPIRELMTSNQVSLSCAVKGFYPSDIAVEWESNGQPENNYKTTPPVLDSDGSFFLVSKLTVDKSRWQQGNVFSCSVMHEALHNHYTQKSLSLSPGK

SEQ ID NO: 2025 - protein, 238 aa, synthetic construct; identical to SEQ ID NO: 52
  REGION 1..238: note = Ab0533 HC Knob Fc-6xHis

SEQ ID NO: 2026 - protein, 5 aa, synthetic construct
  REGION 1..5: note = Ab0533 CDR H1
TYAMD

SEQ ID NO: 2027 - protein, 19 aa, synthetic construct
  REGION 1..19: note = Ab0533 CDR H2
RIRSKYNNYATYYADSVKG

SEQ ID NO: 2028 - protein, 14 aa, synthetic construct
  REGION 1..14: note = Ab0533 CDR H3
HGNFGNSYVSWFAY

SEQ ID NO: 2029 - protein, 14 aa, synthetic construct
  REGION 1..14: note = Ab0533 CDR L1
ASSTGAVTTSNYAN

SEQ ID NO: 2030 - protein, 7 aa, synthetic construct
  REGION 1..7: note = Ab0533 CDR L2
GTNKKAS

SEQ ID NO: 2031 - protein, 9 aa, synthetic construct
  REGION 1..9: note = Ab0533 CDR L3
ALWYSNLWV

SEQ ID NO: 2032 - protein, 482 aa, synthetic construct
  REGION 1..482: note = Ab0534 HC Hole scFv-Fc
EVQLVESGGGLVQPGGSLRLSCAASGFTFNTYAMDWVRQAPGKGLEWVARIRSKYNNYATYYADSVKGRFTISRDDSKNSLYLQMNSLKTEDTAVYYCVRHGNFGNSYVSWFAYWGQGTLVTVSSGGGGSGGGGSGGGGSDIVVTQSPDSLAVSLGERATINCKSSTGAVTTSNYANWVQQKPGQPFKGLIGGTNKRASGVPDRFSGSLSGDDATLTISSLQAEDVAVYYCALWYSNLWVFGQGTKLEIKGGGGSDKTHTCPPCPAPEAAGGPSVFLFPPKPKDTLMISRTPEVTCVVVDVSHEDPEVKFNWYVDGVEVHNAKTKPREEQYNSTYRVVSVLTVLHQDWLNGKEYKCKVSNKALGAPIEKTISKAKGQPREPQVYTLPPIRELMTSNQVSLSCAVKGFYPSDIAVEWESNGQPENNYKTTPPVLDSDGSFFLVSKLTVDKSRWQQGNVFSCSVMHEALHNHYTQKSLSLSPGK

SEQ ID NO: 2033 - protein, 238 aa, synthetic construct; identical to SEQ ID NO: 52
  REGION 1..238: note = Ab0534 H Cknob Fc-6xHis

SEQ ID NO: 2034 - protein, 5 aa, synthetic construct
  REGION 1..5: note = Ab0534 CDR H1
TYAMD

SEQ ID NO: 2035 - protein, 19 aa, synthetic construct
  REGION 1..19: note = Ab0534 CDR H2
RIRSKYNNYATYYADSVKG

SEQ ID NO: 2036 - protein, 14 aa, synthetic construct
  REGION 1..14: note = Ab0534 CDR H3
HGNFGNSYVSWFAY

SEQ ID NO: 2037 - protein, 14 aa, synthetic construct
  REGION 1..14: note = Ab0534 CDR L1
KSSTGAVTTSNYAN

SEQ ID NO: 2038 - protein, 7 aa, synthetic construct
  REGION 1..7: note = Ab0534 CDR L2
GTNKRAS

SEQ ID NO: 2039 - protein, 9 aa, synthetic construct
  REGION 1..9: note = Ab0534 CDR L3
ALWYSNLWV

SEQ ID NO: 2040 - protein, 482 aa, synthetic construct
  REGION 1..482: note = Ab0535 HC Hole scFv-Fc
EVQLVESGGGLVQPGGSLRLSCAASGFTFNTYAMNWVRQAPGKGLEWVARIRSKYNNYATYYADSVKGRFTISRDDSKSILYLQMNSLRAEDTAVYYCVRHGNFGNSYVSWFAYWGQGTLVTVSSGGGGSGGGGSGGGGSEIVVTQSPATLSLSPGERATLSCRSSTGAVTTSNYANWVQQKPGQAFRGLIGGTNKRATGIPARFSGSLSGDDATLTISSLEPEDFAVYYCALWYSNLWVFGQGTKLEIKGGGGSDKTHTCPPCPAPEAAGGPSVFLFPPKPKDTLMISRTPEVTCVVVDVSHEDPEVKFNWYVDGVEVHNAKTKPREEQYNSTYRVVSVLTVLHQDWLNGKEYKCKVSNKALGAPIEKTISKAKGQPREPQVYTLPPIRELMTSNQVSLSCAVKGFYPSDIAVEWESNGQPENNYKTTPPVLDSDGSFFLVSKLTVDKSRWQQGNVFSCSVMHEALHNHYTQKSLSLSPGK

SEQ ID NO: 2041 - protein, 238 aa, synthetic construct; identical to SEQ ID NO: 52
  REGION 1..238: note = Ab0535 HC Knob Fc-6xHis

SEQ ID NO: 2042 - protein, 5 aa, synthetic construct
  REGION 1..5: note = Ab0535 CDR H1
TYAMN

SEQ ID NO: 2043 - protein, 19 aa, synthetic construct
  REGION 1..19: note = Ab0535 CDR H2
RIRSKYNNYATYYADSVKG

SEQ ID NO: 2044 - protein, 14 aa, synthetic construct
  REGION 1..14: note = Ab0535 CDR H3
HGNFGNSYVSWFAY

SEQ ID NO: 2045 - protein, 14 aa, synthetic construct
  REGION 1..14: note = Ab0535 CDR L1
RSSTGAVTTSNYAN

SEQ ID NO: 2046 - protein, 7 aa, synthetic construct
  REGION 1..7: note = Ab0535 CDR L2
GTNKRAT

SEQ ID NO: 2047 - protein, 9 aa, synthetic construct
  REGION 1..9: note = Ab0535 CDR L3
ALWYSNLWV

SEQ ID NO: 2048 - protein, 481 aa, synthetic construct
  REGION 1..481: note = Ab0536 HC Hole scFv-Fc
EVQLVESGGGLVQPGGSLRLSCAASGFTFNTYAMSWVRQAPGKGLEWVARIRSKYNNYATYYADSVKGRFTISRDDSKNTLYLQMNSLRAEDTAVYYCVRHGNFGNSYVSWFAYWGQGTLVTVSSGGGGSGGGGSGGGGSQAAVTQPPSASGSPGQSVTISCTSSTGAVTTSNYANWVQQHPGKAFKGMIGGTNKRASGVPDRFSGSLSGDTASLTVSGLQAEDEADYYCALWYSNLWVFGGGTKLTVLGGGGSDKTHTCPPCPAPEAAGGPSVFLFPPKPKDTLMISRTPEVTCVVVDVSHEDPEVKFNWYVDGVEVHNAKTKPREEQYNSTYRVVSVLTVLHQDWLNGKEYKCKVSNKALGAPIEKTISKAKGQPREPQVYTLPPIRELMTSNQVSLSCAVKGFYPSDIAVEWESNGQPENNYKTTPPVLDSDGSFFLVSKLTVDKSRWQQGNVFSCSVMHEALHNHYTQKSLSLSPGK

SEQ ID NO: 2049 - protein, 238 aa, synthetic construct; identical to SEQ ID NO: 52
  REGION 1..238: note = Ab0536 HC Knob Fc-6xHis

SEQ ID NO: 2050 - protein, 5 aa, synthetic construct
  REGION 1..5: note = Ab0536 CDR H1
TYAMS

SEQ ID NO: 2051 - protein, 19 aa, synthetic construct
  REGION 1..19: note = Ab0536 CDR H2
RIRSKYNNYATYYADSVKG

SEQ ID NO: 2052 - protein, 14 aa, synthetic construct
  REGION 1..14: note = Ab0536 CDR H3
HGNFGNSYVSWFAY

SEQ ID NO: 2053 - protein, 14 aa, synthetic construct
  REGION 1..14: note = Ab0536 CDR L1
TSSTGAVTTSNYAN

SEQ ID NO: 2054 - protein, 7 aa, synthetic construct
  REGION 1..7: note = Ab0536 CDR L2
GTNKRAS

SEQ ID NO: 2055 - protein, 9 aa, synthetic construct
  REGION 1..9: note = Ab0536 CDR L3
ALWYSNLWV

SEQ ID NO: 2056 - protein, 481 aa, synthetic construct
  REGION 1..481: note = Ab0537 HC Hole scFv-Fc
EVQLVESGSELKKPGASVKVSCKASGFTFNTYAMNWVRQAPGQGLEWVARIRSKYNNYATYYADGFTGRFVISRDDSVSILYLQISSLKAEDTAVYYCVRHGNFGNSYVSWFAYWGQGTLVTVSSGGGGSGGGGSGGGGSQAVVTQPPSVSAAPGQKVTISCSSSTGAVTTSNYANWVQQLPGTAFKGLIGGTNKRASGIPDRFSGSLSGDSATLGITGLQTGDEADYYCALWYSNLWVFGGGTKLTVLGGGGSDKTHTCPPCPAPEAAGGPSVFLFPPKPKDTLMISRTPEVTCVVVDVSHEDPEVKFNWYVDGVEVHNAKTKPREEQYNSTYRVVSVLTVLHQDWLNGKEYKCKVSNKALGAPIEKTISKAKGQPREPQVYTLPPIRELMTSNQVSLSCAVKGFYPSDIAVEWESNGQPENNYKTTPPVLDSDGSFFLVSKLTVDKSRWQQGNVFSCSVMHEALHNHYTQKSLSLSPGK

SEQ ID NO: 2057 - protein, 238 aa, synthetic construct; identical to SEQ ID NO: 52
  REGION 1..238: note = Ab0537 HC Knob Fc-6xHis

SEQ ID NO: 2058 - protein, 5 aa, synthetic construct
  REGION 1..5: note = Ab0537 CDR H1
TYAMN

SEQ ID NO: 2059 - protein, 19 aa, synthetic construct
  REGION 1..19: note = Ab0537 CDR H2
RIRSKYNNYATYYADGFTG

SEQ ID NO: 2060 - protein, 14 aa, synthetic construct
  REGION 1..14: note = Ab0537 CDR H3
HGNFGNSYVSWFAY

SEQ ID NO: 2061 - protein, 14 aa, synthetic construct
  REGION 1..14: note = Ab0537 CDR L1
SSSTGAVTTSNYAN

SEQ ID NO: 2062 - protein, 7 aa, synthetic construct
  REGION 1..7: note = Ab0537 CDR L2
GTNKRAS

SEQ ID NO: 2063 - protein, 9 aa, synthetic construct
  REGION 1..9: note = Ab0537 CDR L3
ALWYSNLWV

SEQ ID NO: 2064 - protein, 481 aa, synthetic construct
  REGION 1..481: note = Ab0538 HC Hole scFv-Fc
QVQLVQSGSELKKPGASVKVSCKASGFTFNTYAMNWVRQAPGQGLEWMARIRSKYNNYATYYADGFTGRFVFSRDDSVSTLYLQISSLKAEDTAVYYCVRHGNFGNSYVSWFAYWGQGTLVTVSSGGGGSGGGGSGGGGSQAVVTQEPSLTVSPGGTVTLTCASSTGAVTTSNYANWVQQKPGQAFRGLIGGTNKKASWTPARFSGSLLGTDFALTLSGVQPEDEAEYYCALWYSNLWVFGGGTKLTVLGGGGSDKTHTCPPCPAPEAAGGPSVFLFPPKPKDTLMISRTPEVTCVVVDVSHEDPEVKFNWYVDGVEVHNAKTKPREEQYNSTYRVVSVLTVLHQDWLNGKEYKCKVSNKALGAPIEKTISKAKGQPREPQVYTLPPIRELMTSNQVSLSCAVKGFYPSDIAVEWESNGQPENNYKTTPPVLDSDGSFFLVSKLTVDKSRWQQGNVFSCSVMHEALHNHYTQKSLSLSPGK

SEQ ID NO: 2065 - protein, 238 aa, synthetic construct; identical to SEQ ID NO: 52
  REGION 1..238: note = Ab0538 HC Knob Fc-6xHis

SEQ ID NO: 2066 - protein, 5 aa, synthetic construct
  REGION 1..5: note = Ab0538 CDR H1
TYAMN

SEQ ID NO: 2067 - protein, 19 aa, synthetic construct
  REGION 1..19: note = Ab0538 CDR H2
RIRSKYNNYATYYADGFTG

SEQ ID NO: 2068 - protein, 14 aa, synthetic construct
  REGION 1..14: note = Ab0538 CDR H3
HGNFGNSYVSWFAY

SEQ ID NO: 2069 - protein, 14 aa, synthetic construct
  REGION 1..14: note = Ab0538 CDR L1
ASSTGAVTTSNYAN

SEQ ID NO: 2070 - protein, 7 aa, synthetic construct
  REGION 1..7: note = Ab0538 CDR L2
GTNKKAS

SEQ ID NO: 2071 - protein, 9 aa, synthetic construct
  REGION 1..9: note = Ab0538 CDR L3
ALWYSNLWV

SEQ ID NO: 2072 - protein, 482 aa, synthetic construct
  REGION 1..482: note = Ab0539 HC Hole scFv-Fc
QVQLVQSGSELKKPGASVKVSCKASGFTFNTYAMNWVRQAPGQGLEWMARIRSKYNNYATYYADGFTGRFVFSRDDSVSTLYLQISSLKAEDTAVYYCVRHGNFGNSYVSWFAYWGQGTLVTVSSGGGGSGGGGSGGGGSDIVVTQSPDSLAVSLGERATINCKSSTGAVTTSNYANWVQQKPGQPFKGLIGGTNKRASGVPDRFSGSLSGDDATLTISSLQAEDVAVYYCALWYSNLWVFGQGTKLEIKGGGGSDKTHTCPPCPAPEAAGGPSVFLFPPKPKDTLMISRTPEVTCVVVDVSHEDPEVKFNWYVDGVEVHNAKTKPREEQYNSTYRVVSVLTVLHQDWLNGKEYKCKVSNKALGAPIEKTISKAKGQPREPQVYTLPPIRELMTSNQVSLSCAVKGFYPSDIAVEWESNGQPENNYKTTPPVLDSDGSFFLVSKLTVDKSRWQQGNVFSCSVMHEALHNHYTQKSLSLSPGK

SEQ ID NO: 2073 - protein, 238 aa, synthetic construct; identical to SEQ ID NO: 52
  REGION 1..238: note = Ab0539 HC Knob Fc-6xHis

SEQ ID NO: 2074 - protein, 5 aa, synthetic construct
  REGION 1..5: note = Ab0539 CDR H1
TYAMN

SEQ ID NO: 2075 - protein, 19 aa, synthetic construct
  REGION 1..19: note = Ab0539 CDR H2
RIRSKYNNYATYYADGFTG

SEQ ID NO: 2076 - protein, 14 aa, synthetic construct
  REGION 1..14: note = Ab0539 CDR H3
HGNFGNSYVSWFAY

SEQ ID NO: 2077 - protein, 14 aa, synthetic construct
  REGION 1..14: note = Ab0539 CDR L1
KSSTGAVTTSNYAN

SEQ ID NO: 2078 - protein, 7 aa, synthetic construct
  REGION 1..7: note = Ab0539 CDR L2
GTNKRAS

SEQ ID NO: 2079 - protein, 9 aa, synthetic construct
  REGION 1..9: note = Ab0539 CDR L3
ALWYSNLWV

SEQ ID NO: 2080 - protein, 482 aa, synthetic construct
  REGION 1..482: note = Ab0540 HC Hole scFv-Fc
QVQLVQSGAEVKKPGASVKVSCKASGFTFNTYAMHWVRQAPGQGLEWMARIRSKYNNYATYYADKFQGRVTMTRDDSTSTLYMELSSLRSEDTAVYYCVRHGNFGNSYVSWFAYWGQGTLVTVSSGGGGSGGGGSGGGGSEIVVTQSPATLSLSPGERATLSCRSSTGAVTTSNYANWVQQKPGQAFRGLIGGTNKRATGIPARFSGSLSGDDATLTISSLEPEDFAVYYCALWYSNLWVFGQGTKLEIKGGGGSDKTHTCPPCPAPEAAGGPSVFLFPPKPKDTLMISRTPEVTCVVVDVSHEDPEVKFNWYVDGVEVHNAKTKPREEQYNSTYRVVSVLTVLHQDWLNGKEYKCKVSNKALGAPIEKTISKAKGQPREPQVYTLPPIRELMTSNQVSLSCAVKGFYPSDIAVEWESNGQPENNYKTTPPVLDSDGSFFLVSKLTVDKSRWQQGNVFSCSVMHEALHNHYTQKSLSLSPGK

SEQ ID NO: 2081 - protein, 238 aa, synthetic construct; identical to SEQ ID NO: 52
  REGION 1..238: note = Ab0540 HC Knob Fc-6xHis

SEQ ID NO: 2082 - protein, 5 aa, synthetic construct
  REGION 1..5: note = Ab0540 CDR H1
TYAMH

SEQ ID NO: 2083 - protein, 19 aa, synthetic construct
  REGION 1..19: note = Ab0540 CDR H2
RIRSKYNNYATYYADKFQG

SEQ ID NO: 2084 - protein, 14 aa, synthetic construct
  REGION 1..14: note = Ab0540 CDR H3
HGNFGNSYVSWFAY

SEQ ID NO: 2085 - protein, 14 aa, synthetic construct
  REGION 1..14: note = Ab0540 CDR L1
RSSTGAVTTSNYAN

SEQ ID NO: 2086 - protein, 7 aa, synthetic construct
  REGION 1..7: note = Ab0540 CDR L2
GTNKRAT

SEQ ID NO: 2087 - protein, 9 aa, synthetic construct
  REGION 1..9: note = Ab0540 CDR L3
ALWYSNLWV

SEQ ID NO: 2088 - protein, 482 aa, synthetic construct
  REGION 1..482: note = Ab0541 HC Hole scFv-Fc
EVQLVESGGGLVQPGGSLRLSCAASGFTFNTYAMNWVRQAPGKGLEWVARIRSKYNNYATYYADSVKGRFTISRDDSKSILYLQMNSLKTEDTAVYYCVRHGNFGNSYVSWFAYWGQGTLVTVSSGGGGSGGGGSGGGGSEIVVTQSPATLSLSPGERATLSCRSSTGAVTTSNYANWVQEKPGQAFRGLIGGTNKRAPGVPARFSGSLIGTDFTLTISSLEPEDFAVYFCALWYSNLWVFGQGTKLEIKGGGGSDKTHTCPPCPAPEAAGGPSVFLFPPKPKDTLMISRTPEVTCVVVDVSHEDPEVKFNWYVDGVEVHNAKTKPREEQYNSTYRVVSVLTVLHQDWLNGKEYKCKVSNKALGAPIEKTISKAKGQPREPQVYTLPPIRELMTSNQVSLSCAVKGFYPSDIAVEWESNGQPENNYKTTPPVLDSDGSFFLVSKLTVDKSRWQQGNVFSCSVMHEALHNHYTQKSLSLSPGK

SEQ ID NO: 2089 - protein, 238 aa, synthetic construct; identical to SEQ ID NO: 52
  REGION 1..238: note = Ab0541 HC Knob Fc-6xHis

SEQ ID NO: 2090 - protein, 5 aa, synthetic construct
  REGION 1..5: note = Ab0541 CDR H1
TYAMN

SEQ ID NO: 2091 - protein, 19 aa, synthetic construct
  REGION 1..19: note = Ab0541 CDR H2
RIRSKYNNYATYYADSVKG

SEQ ID NO: 2092 - protein, 14 aa, synthetic construct
  REGION 1..14: note = Ab0541 CDR H3
HGNFGNSYVSWFAY

SEQ ID NO: 2093 - protein, 14 aa, synthetic construct
  REGION 1..14: note = Ab0541 CDR L1
RSSTGAVTTSNYAN

SEQ ID NO: 2094 - protein, 7 aa, synthetic construct
  REGION 1..7: note = Ab0541 CDR L2
GTNKRAP

SEQ ID NO: 2095 - protein, 9 aa, synthetic construct
  REGION 1..9: note = Ab0541 CDR L3
ALWYSNLWV

SEQ ID NO: 2096 - protein, 481 aa, synthetic construct
  REGION 1..481: note = Ab0542 HC Hole scFv-Fc
EVQLVESGGGLVQPGGSLRLSCAASGFTFNTYAMDWVRQAPGKGLEWVARIRSKYNNYATYYADSVKGRFTISRDDSKNSLYLQMNSLKTEDTAVYYCVRHGNFGNSYVSWFAYWGQGTLVTVSSGGGGSGGGGSGGGGSQAVVTQEPSFSVSPGGTVTLTCGSSTGAVTTSNYANWVQQTPGQAFRGLIGGTNKRASGVPDRFSGSLLGDKAALTITGAQADDESDYYCALWYSNLWVFGGGTKLTVLGGGGSDKTHTCPPCPAPEAAGGPSVFLFPPKPKDTLMISRTPEVTCVVVDVSHEDPEVKFNWYVDGVEVHNAKTKPREEQYNSTYRVVSVLTVLHQDWLNGKEYKCKVSNKALGAPIEKTISKAKGQPREPQVYTLPPIRELMTSNQVSLSCAVKGFYPSDIAVEWESNGQPENNYKTTPPVLDSDGSFFLVSKLTVDKSRWQQGNVFSCSVMHEALHNHYTQKSLSLSPGK

SEQ ID NO: 2097 - protein, 238 aa, synthetic construct; identical to SEQ ID NO: 52
  REGION 1..238: note = Ab0542 HC Knob Fc-6xHis

SEQ ID NO: 2098 - protein, 5 aa, synthetic construct
  REGION 1..5: note = Ab0542 CDR H1
TYAMD

SEQ ID NO: 2099 - protein, 19 aa, synthetic construct
  REGION 1..19: note = Ab0542 CDR H2
RIRSKYNNYATYYADSVKG

SEQ ID NO: 2100 - protein, 14 aa, synthetic construct
  REGION 1..14: note = Ab0542 CDR H3
HGNFGNSYVSWFAY

SEQ ID NO: 2101 - protein, 14 aa, synthetic construct
  REGION 1..14: note = Ab0542 CDR L1
GSSTGAVTTSNYAN

SEQ ID NO: 2102 - protein, 7 aa, synthetic construct
  REGION 1..7: note = Ab0542 CDR L2
GTNKRAS

SEQ ID NO: 2103 - protein, 9 aa, synthetic construct
  REGION 1..9: note = Ab0542 CDR L3
ALWYSNLWV

SEQ ID NO: 2104 - protein, 481 aa, synthetic construct
  REGION 1..481: note = Ab0543 HC Hole scFv-Fc
EVQLVESGGGLVQPGGSLRLSCAASGFTFNTYAMNWVRQAPGKGLEWVARIRSKYNNYATYYADSVKGRFTISRDDSKSILYLQMNSLRAEDTAVYYCVRHGNFGNSYVSWFAYWGQGTLVTVSSGGGGSGGGGSGGGGSQAVVTQEPSLTVSPGGTVTLTCASSTGAVTTSNYANWVQEKPGQAFRGLIGGTNKRAPWVPARFSGSLIGDKAALTLSGVQPEDEAEYFCALWYSNLWVFGGGTKLTVLGGGGSDKTHTCPPCPAPEAAGGPSVFLFPPKPKDTLMISRTPEVTCVVVDVSHEDPEVKFNWYVDGVEVHNAKTKPREEQYNSTYRVVSVLTVLHQDWLNGKEYKCKVSNKALGAPIEKTISKAKGQPREPQVYTLPPIRELMTSNQVSLSCAVKGFYPSDIAVEWESNGQPENNYKTTPPVLDSDGSFFLVSKLTVDKSRWQQGNVFSCSVMHEALHNHYTQKSLSLSPGK

SEQ ID NO: 2105 - protein, 238 aa, synthetic construct; identical to SEQ ID NO: 52
  REGION 1..238: note = Ab0543 HC Knob Fc-6xHis

SEQ ID NO: 2106 - protein, 5 aa, synthetic construct
  REGION 1..5: note = Ab0543 CDR H1
TYAMN

SEQ ID NO: 2107 - protein, 19 aa, synthetic construct
  REGION 1..19: note = Ab0543 CDR H2
RIRSKYNNYATYYADSVKG

SEQ ID NO: 2108 - protein, 14 aa, synthetic construct
  REGION 1..14: note = Ab0543 CDR H3
HGNFGNSYVSWFAY

SEQ ID NO: 2109 - protein, 14 aa, synthetic construct
  REGION 1..14: note = Ab0543 CDR L1
ASSTGAVTTSNYAN

SEQ ID NO: 2110 - protein, 7 aa, synthetic construct
  REGION 1..7: note = Ab0543 CDR L2
GTNKRAP

SEQ ID NO: 2111 - protein, 9 aa, synthetic construct
  REGION 1..9: note = Ab0543 CDR L3
ALWYSNLWV

SEQ ID NO: 2112 - protein, 482 aa, synthetic construct
  REGION 1..482: note = Ab0544 HC Hole scFv-Fc
EVQLVESGGGLVQPGGSLRLSCAASGFTFNTYAMNWVRQAPGKGLEWVARIRSKYNNYATYYADSVKGRFTISRDDSKSILYLQMNSLRAEDTAVYYCVRHGNFGNSYVSWFAYWGQGTLVTVSSGGGGSGGGGSGGGGSEIVVTQSPATLSLSPGERATLSCRSSTGAVTTSNYANWVQQKPGQAFRGLIGGTNKRATGIPARFSGSLSGTDFTLTISSLEPEDFAVYYCALWYSNLWVFGQGTKLEIKGGGGSDKTHTCPPCPAPEAAGGPSVFLFPPKPKDTLMISRTPEVTCVVVDVSHEDPEVKFNWYVDGVEVHNAKTKPREEQYNSTYRVVSVLTVLHQDWLNGKEYKCKVSNKALGAPIEKTISKAKGQPREPQVYTLPPIRELMTSNQVSLSCAVKGFYPSDIAVEWESNGQPENNYKTTPPVLDSDGSFFLVSKLTVDKSRWQQGNVFSCSVMHEALHNHYTQKSLSLSPGK

SEQ ID NO: 2113 - protein, 238 aa, synthetic construct; identical to SEQ ID NO: 52
  REGION 1..238: note = Ab0544 HC Knob Fc-6xHis

SEQ ID NO: 2114 - protein, 5 aa, synthetic construct
  REGION 1..5: note = Ab0544 CDR H1
TYAMN

SEQ ID NO: 2115 - protein, 19 aa, synthetic construct
  REGION 1..19: note = Ab0544 CDR H2
RIRSKYNNYATYYADSVKG

SEQ ID NO: 2116 - protein, 14 aa, synthetic construct
  REGION 1..14: note = Ab0544 CDR H3
HGNFGNSYVSWFAY

SEQ ID NO: 2117 - protein, 14 aa, synthetic construct
  REGION 1..14: note = Ab0544 CDR L1
RSSTGAVTTSNYAN

SEQ ID NO: 2118 - protein, 7 aa, synthetic construct
  REGION 1..7: note = Ab0544 CDR L2
GTNKRAT

SEQ ID NO: 2119 - protein, 9 aa, synthetic construct
  REGION 1..9: note = Ab0544 CDR L3
ALWYSNLWV

SEQ ID NO: 2120 - protein, 482 aa, synthetic construct
  REGION 1..482: note = Ab0545 HC Hole scFv-Fc
EVQLVESGGGLVQPGGSLRLSCAASGFTFNTYAMSWVRQAPGKGLEWVARIRSKYNNYATYYADSVKGRFTISRDDSKNTLYLQMNSLRAEDTAVYYCVRHGNFGNSYVSWFAYWGQGTLVTVSSGGGGSGGGGSGGGGSEIVVTQSPATLSLSPGERATLSCRSSTGAVTTSNYANWVQQKPGQAFRGLIGGTNKRATGIPARFSGSLSGDDATLTISSLEPEDFAVYYCALWYSNLWVFGQGTKLEIKGGGGSDKTHTCPPCPAPEAAGGPSVFLFPPKPKDTLMISRTPEVTCVVVDVSHEDPEVKFNWYVDGVEVHNAKTKPREEQYNSTYRVVSVLTVLHQDWLNGKEYKCKVSNKALGAPIEKTISKAKGQPREPQVYTLPPIRELMTSNQVSLSCAVKGFYPSDIAVEWESNGQPENNYKTTPPVLDSDGSFFLVSKLTVDKSRWQQGNVFSCSVMHEALHNHYTQKSLSLSPGK

SEQ ID NO: 2121 - protein, 238 aa, synthetic construct; identical to SEQ ID NO: 52
  REGION 1..238: note = Ab0545 HC Knob Fc-6xHis

SEQ ID NO: 2122 - protein, 5 aa, synthetic construct
  REGION 1..5: note = Ab0545 CDR H1
TYAMS

SEQ ID NO: 2123 - protein, 19 aa, synthetic construct
  REGION 1..19: note = Ab0545 CDR H2
RIRSKYNNYATYYADSVKG

SEQ ID NO: 2124 - protein, 14 aa, synthetic construct
  REGION 1..14: note = Ab0545 CDR H3
HGNFGNSYVSWFAY

SEQ ID NO: 2125 - protein, 14 aa, synthetic construct
  REGION 1..14: note = Ab0545 CDR L1
RSSTGAVTTSNYAN

SEQ ID NO: 2126 - protein, 7 aa, synthetic construct
  REGION 1..7: note = Ab0545 CDR L2
GTNKRAT

SEQ ID NO: 2127 - protein, 9 aa, synthetic construct
  REGION 1..9: note = Ab0545 CDR L3
ALWYSNLWV

SEQ ID NO: 2128 - protein, 481 aa, synthetic construct
  REGION 1..481: note = Ab0546 HC Hole scFv-Fc
EVQLVESGSELKKPGASVKVSCKASGFTFNTYAMNWVRQAPGQGLEWVARIRSKYNNYATYYADGFTGRFVISRDDSVSILYLQISSLKAEDTAVYYCVRHGNFGNSYVSWFAYWGQGTLVTVSSGGGGSGGGGSGGGGSQAAVTQPPSASGSPGQSVTISCTSSTGAVTTSNYANWVQQHPGKAFKGMIGGTNKRASGVPDRFSGSLSGDTASLTVSGLQAEDEADYYCALWYSNLWVFGGGTKLTVLGGGGSDKTHTCPPCPAPEAAGGPSVFLFPPKPKDTLMISRTPEVTCVVVDVSHEDPEVKFNWYVDGVEVHNAKTKPREEQYNSTYRVVSVLTVLHQDWLNGKEYKCKVSNKALGAPIEKTISKAKGQPREPQVYTLPPIRELMTSNQVSLSCAVKGFYPSDIAVEWESNGQPENNYKTTPPVLDSDGSFFLVSKLTVDKSRWQQGNVFSCSVMHEALHNHYTQKSLSLSPGK

SEQ ID NO: 2129 - protein, 238 aa, synthetic construct; identical to SEQ ID NO: 52
  REGION 1..238: note = Ab0546 HC Knob Fc-6xHis

SEQ ID NO: 2130 - protein, 5 aa, synthetic construct
  REGION 1..5: note = Ab0546 CDR H1
TYAMN

SEQ ID NO: 2131 - protein, 19 aa, synthetic construct
  REGION 1..19: note = Ab0546 CDR H2
RIRSKYNNYATYYADGFTG

SEQ ID NO: 2132 - protein, 14 aa, synthetic construct
  REGION 1..14: note = Ab0546 CDR H3
HGNFGNSYVSWFAY

SEQ ID NO: 2133 - protein, 14 aa, synthetic construct
  REGION 1..14: note = Ab0546 CDR L1
TSSTGAVTTSNYAN

SEQ ID NO: 2134 - protein, 7 aa, synthetic construct
  REGION 1..7: note = Ab0546 CDR L2
GTNKRAS

SEQ ID NO: 2135 - protein, 9 aa, synthetic construct
  REGION 1..9: note = Ab0546 CDR L3
ALWYSNLWV

SEQ ID NO: 2136 - protein, 481 aa, synthetic construct
  REGION 1..481: note = Ab0547 HC Hole scFv-Fc
QVQLVQSGSELKKPGASVKVSCKASGFTFNTYAMNWVRQAPGQGLEWMARIRSKYNNYATYYADGFTGRFVFSRDDSVSTLYLQISSLKAEDTAVYYCVRHGNFGNSYVSWFAYWGQGTLVTVSSGGGGSGGGGSGGGGSQAVVTQEPSFSVSPGGTVTLTCGSSTGAVTTSNYANWVQQTPGQAFRGLIGGTNKRASGVPDRFSGSLLGDKAALTITGAQADDESDYYCALWYSNLWVFGGGTKLTVLGGGGSDKTHTCPPCPAPEAAGGPSVFLFPPKPKDTLMISRTPEVTCVVVDVSHEDPEVKFNWYVDGVEVHNAKTKPREEQYNSTYRVVSVLTVLHQDWLNGKEYKCKVSNKALGAPIEKTISKAKGQPREPQVYTLPPIRELMTSNQVSLSCAVKGFYPSDIAVEWESNGQPENNYKTTPPVLDSDGSFFLVSKLTVDKSRWQQGNVFSCSVMHEALHNHYTQKSLSLSPGK

SEQ ID NO: 2137 - protein, 238 aa, synthetic construct; identical to SEQ ID NO: 52
  REGION 1..238: note = Ab0547 HC Knob Fc-6xHis

SEQ ID NO: 2138 - protein, 5 aa, synthetic construct
  REGION 1..5: note = Ab0547 CDR H1
TYAMN

SEQ ID NO: 2139 - protein, 19 aa, synthetic construct
  REGION 1..19: note = Ab0547 CDR H2
RIRSKYNNYATYYADGFTG

SEQ ID NO: 2140 - protein, 14 aa, synthetic construct
  REGION 1..14: note = Ab0547 CDR H3
HGNFGNSYVSWFAY

SEQ ID NO: 2141 - protein, 14 aa, synthetic construct
  REGION 1..14: note = Ab0547 CDR L1
GSSTGAVTTSNYAN

SEQ ID NO: 2142 - protein, 7 aa, synthetic construct
  REGION 1..7: note = Ab0547 CDR L2
GTNKRAS

SEQ ID NO: 2143 - protein, 9 aa, synthetic construct
  REGION 1..9: note = Ab0547 CDR L3
ALWYSNLWV

SEQ ID NO: 2144 - protein, 481 aa, synthetic construct
  REGION 1..481: note = Ab0548 HC Hole scFv-Fc
QVQLVQSGAEVKKPGASVKVSCKASGFTFNTYAMHWVRQAPGQGLEWMARIRSKYNNYATYYADKFQGRVTMTRDDSTSTLYMELSSLRSEDTAVYYCVRHGNFGNSYVSWFAYWGQGTLVTVSSGGGGSGGGGSGGGGSQAVVTQEPSLTVSPGGTVTLTCASSTGAVTTSNYANWVQEKPGQAFRGLIGGTNKRAPWVPARFSGSLIGDKAALTLSGVQPEDEAEYFCALWYSNLWVFGGGTKLTVLGGGGSDKTHTCPPCPAPEAAGGPSVFLFPPKPKDTLMISRTPEVTCVVVDVSHEDPEVKFNWYVDGVEVHNAKTKPREEQYNSTYRVVSVLTVLHQDWLNGKEYKCKVSNKALGAPIEKTISKAKGQPREPQVYTLPPIRELMTSNQVSLSCAVKGFYPSDIAVEWESNGQPENNYKTTPPVLDSDGSFFLVSKLTVDKSRWQQGNVFSCSVMHEALHNHYTQKSLSLSPGK

SEQ ID NO: 2145 - protein, 238 aa, synthetic construct; identical to SEQ ID NO: 52
  REGION 1..238: note = Ab0548 HC Knob Fc-6xHis

SEQ ID NO: 2146 - protein, 5 aa, synthetic construct
  REGION 1..5: note = Ab0548 CDR H1
TYAMH

SEQ ID NO: 2147 - protein, 19 aa, synthetic construct
  REGION 1..19: note = Ab0548 CDR H2
RIRSKYNNYATYYADKFQG

SEQ ID NO: 2148 - protein, 14 aa, synthetic construct
  REGION 1..14: note = Ab0548 CDR H3
HGNFGNSYVSWFAY

SEQ ID NO: 2149 - protein, 14 aa, synthetic construct
  REGION 1..14: note = Ab0548 CDR L1
ASSTGAVTTSNYAN

SEQ ID NO: 2150 - protein, 7 aa, synthetic construct
  REGION 1..7: note = Ab0548 CDR L2
GTNKRAP

SEQ ID NO: 2151 - protein, 9 aa, synthetic construct
  REGION 1..9: note = Ab0548 CDR L3
ALWYSNLWV

SEQ ID NO: 2152 - protein, 482 aa, synthetic construct
  REGION 1..482: note = Ab0549 HC Hole scFv-Fc
QVQLVQSGAEVKKPGASVKVSCKASGFTFNTYAMHWVRQAPGQGLEWMARIRSKYNNYATYYADKFQGRVTMTRDDSTSTLYMELSSLRSEDTAVYYCVRHGNFGNSYVSWFAYWGQGTLVTVSSGGGGSGGGGSGGGGSEIVVTQSPATLSLSPGERATLSCRSSTGAVTTSNYANWVQQKPGQAFRGLIGGTNKRATGIPARFSGSLSGTDFTLTISSLEPEDFAVYYCALWYSNLWVFGQGTKLEIKGGGGSDKTHTCPPCPAPEAAGGPSVFLFPPKPKDTLMISRTPEVTCVVVDVSHEDPEVKFNWYVDGVEVHNAKTKPREEQYNSTYRVVSVLTVLHQDWLNGKEYKCKVSNKALGAPIEKTISKAKGQPREPQVYTLPPIRELMTSNQVSLSCAVKGFYPSDIAVEWESNGQPENNYKTTPPVLDSDGSFFLVSKLTVDKSRWQQGNVFSCSVMHEALHNHYTQKSLSLSPGK

SEQ ID NO: 2153 - protein, 238 aa, synthetic construct; identical to SEQ ID NO: 52
  REGION 1..238: note = Ab0549 HC Knob Fc-6xHis

SEQ ID NO: 2154 - protein, 5 aa, synthetic construct
  REGION 1..5: note = Ab0549 CDR H1
TYAMH

SEQ ID NO: 2155 - protein, 19 aa, synthetic construct
  REGION 1..19: note = Ab0549 CDR H2
RIRSKYNNYATYYADKFQG

SEQ ID NO: 2156 - protein, 14 aa, synthetic construct
  REGION 1..14: note = Ab0549 CDR H3
HGNFGNSYVSWFAY

SEQ ID NO: 2157 - protein, 14 aa, synthetic construct
  REGION 1..14: note = Ab0549 CDR L1
RSSTGAVTTSNYAN

SEQ ID NO: 2158 - protein, 7 aa, synthetic construct
  REGION 1..7: note = Ab0549 CDR L2
GTNKRAT

SEQ ID NO: 2159 - protein, 9 aa, synthetic construct
  REGION 1..9: note = Ab0549 CDR L3
ALWYSNLWV

SEQ ID NO: 2160 - protein, 482 aa, synthetic construct
  REGION 1..482: note = Ab0550 HC Hole scFv-Fc
EVQLVESGGGLVQPGGSLRLSCAASGFTFNTYAMNWVRQAPGKGLEWVARIRSKYNNYATYYADSVKGRFTISRDDSKSILYLQMNSLKTEDTAVYYCVRHGNFGNSYVSWFAYWGQGTLVTVSSGGGGSGGGGSGGGGSEIVVTQSPATLSLSPGERATLSCRSSTGAVTTSNYANWVQQKPGQAFRGLIGGTNKRATGIPARFSGSLSGDDATLTISSLEPEDFAVYYCALWYSNLWVFGQGTKLEIKGGGGSDKTHTCPPCPAPEAAGGPSVFLFPPKPKDTLMISRTPEVTCVVVDVSHEDPEVKFNWYVDGVEVHNAKTKPREEQYNSTYRVVSVLTVLHQDWLNGKEYKCKVSNKALGAPIEKTISKAKGQPREPQVYTLPPIRELMTSNQVSLSCAVKGFYPSDIAVEWESNGQPENNYKTTPPVLDSDGSFFLVSKLTVDKSRWQQGNVFSCSVMHEALHNHYTQKSLSLSPGK

SEQ ID NO: 2161 - protein, 238 aa, synthetic construct; identical to SEQ ID NO: 52
  REGION 1..238: note = Ab0550 HC Knob Fc-6xHis

SEQ ID NO: 2162 - protein, 5 aa, synthetic construct
  REGION 1..5: note = Ab0550 CDR H1
TYAMN

SEQ ID NO: 2163 - protein, 19 aa, synthetic construct
  REGION 1..19: note = Ab0550 CDR H2
RIRSKYNNYATYYADSVKG

SEQ ID NO: 2164 - protein, 14 aa, synthetic construct
  REGION 1..14: note = Ab0550 CDR H3
HGNFGNSYVSWFAY

SEQ ID NO: 2165 - protein, 14 aa, synthetic construct
  REGION 1..14: note = Ab0550 CDR L1
RSSTGAVTTSNYAN

SEQ ID NO: 2166 - protein, 7 aa, synthetic construct
  REGION 1..7: note = Ab0550 CDR L2
GTNKRAT

SEQ ID NO: 2167 - protein, 9 aa, synthetic construct
  REGION 1..9: note = Ab0550 CDR L3
ALWYSNLWV

SEQ ID NO: 2168 - protein, 481 aa, synthetic construct
  REGION 1..481: note = Ab0551 HC Hole scFv-Fc
EVQLVESGGGLVQPGGSLRLSCAASGFTFNTYAMDWVRQAPGKGLEWVARIRSKYNNYATYYADSVKGRFTISRDDSKNSLYLQMNSLKTEDTAVYYCVRHGNFGNSYVSWFAYWGQGTLVTVSSGGGGSGGGGSGGGGSQAVVTQPPSVSAAPGQKVTISCSSSTGAVTTSNYANWVQQLPGTAFKGLIGGTNKRASGIPDRFSGSLSGDSATLGITGLQTGDEADYYCALWYSNLWVFGGGTKLTVLGGGGSDKTHTCPPCPAPEAAGGPSVFLFPPKPKDTLMISRTPEVTCVVVDVSHEDPEVKFNWYVDGVEVHNAKTKPREEQYNSTYRVVSVLTVLHQDWLNGKEYKCKVSNKALGAPIEKTISKAKGQPREPQVYTLPPIRELMTSNQVSLSCAVKGFYPSDIAVEWESNGQPENNYKTTPPVLDSDGSFFLVSKLTVDKSRWQQGNVFSCSVMHEALHNHYTQKSLSLSPGK

SEQ ID NO: 2169 - protein, 238 aa, synthetic construct; identical to SEQ ID NO: 52
  REGION 1..238: note = Ab0551 HC Knob Fc-6xHis

SEQ ID NO: 2170 - protein, 5 aa, synthetic construct
  REGION 1..5: note = Ab0551 CDR H1
TYAMD

SEQ ID NO: 2171 - protein, 19 aa, synthetic construct
  REGION 1..19: note = Ab0551 CDR H2
RIRSKYNNYATYYADSVKG

SEQ ID NO: 2172 - protein, 14 aa, synthetic construct
  REGION 1..14: note = Ab0551 CDR H3
HGNFGNSYVSWFAY

SEQ ID NO: 2173 - protein, 14 aa, synthetic construct
  REGION 1..14: note = Ab0551 CDR L1
SSSTGAVTTSNYAN

SEQ ID NO: 2174 - protein, 7 aa, synthetic construct
  REGION 1..7: note = Ab0551 CDR L2
GTNKRAS

SEQ ID NO: 2175 - protein, 9 aa, synthetic construct
  REGION 1..9: note = Ab0551 CDR L3
ALWYSNLWV

SEQ ID NO: 2176 - protein, 481 aa, synthetic construct
  REGION 1..481: note = Ab0552 HC Hole scFv-Fc
EVQLVESGGGLVQPGGSLRLSCAASGFTFNTYAMNWVRQAPGKGLEWVARIRSKYNNYATYYADSVKGRFTISRDDSKSILYLQMNSLRAEDTAVYYCVRHGNFGNSYVSWFAYWGQGTLVTVSSGGGGSGGGGSGGGGSQAVVTQEPSLTVSPGGTVTLTCASSTGAVTTSNYANWVQQKPGQAFRGLIGGTNKKASWTPARFSGSLLGDKAALTLSGVQPEDEAEYYCALWYSNLWVFGGGTKLTVLGGGGSDKTHTCPPCPAPEAAGGPSVFLFPPKPKDTLMISRTPEVTCVVVDVSHEDPEVKFNWYVDGVEVHNAKTKPREEQYNSTYRVVSVLTVLHQDWLNGKEYKCKVSNKALGAPIEKTISKAKGQPREPQVYTLPPIRELMTSNQVSLSCAVKGFYPSDIAVEWESNGQPENNYKTTPPVLDSDGSFFLVSKLTVDKSRWQQGNVFSCSVMHEALHNHYTQKSLSLSPGK

SEQ ID NO: 2177 - protein, 238 aa, synthetic construct; identical to SEQ ID NO: 52
  REGION 1..238: note = Ab0552 HC Knob Fc-6xHis

SEQ ID NO: 2178 - protein, 5 aa, synthetic construct
  REGION 1..5: note = Ab0552 CDR H1
TYAMN

SEQ ID NO: 2179 - protein, 19 aa, synthetic construct
  REGION 1..19: note = Ab0552 CDR H2
RIRSKYNNYATYYADSVKG

SEQ ID NO: 2180 - protein, 14 aa, synthetic construct
  REGION 1..14: note = Ab0552 CDR H3
HGNFGNSYVSWFAY

SEQ ID NO: 2181 - protein, 14 aa, synthetic construct
  REGION 1..14: note = Ab0552 CDR L1
ASSTGAVTTSNYAN

SEQ ID NO: 2182 - protein, 7 aa, synthetic construct
  REGION 1..7: note = Ab0552 CDR L2
GTNKKAS

SEQ ID NO: 2183 - protein, 9 aa, synthetic construct
  REGION 1..9: note = Ab0552 CDR L3
ALWYSNLWV

SEQ ID NO: 2184 - protein, 482 aa, synthetic construct
  REGION 1..482: note = Ab0553 HC Hole scFv-Fc
EVQLVESGGGLVQPGGSLRLSCAASGFTFNTYAMNWVRQAPGKGLEWVARIRSKYNNYATYYADSVKGRFTISRDDSKSILYLQMNSLRAEDTAVYYCVRHGNFGNSYVSWFAYWGQGTLVTVSSGGGGSGGGGSGGGGSDIQVTQSPSSLSASVGDRVTITCRSSTGAVTTSNYANWVQQKPGKAFKGLIGGTNKLASGVPSRFSGSLSGDDATLTISSLQPEDFATYYCALWYSNLWVFGQGTKLEIKGGGGSDKTHTCPPCPAPEAAGGPSVFLFPPKPKDTLMISRTPEVTCVVVDVSHEDPEVKFNWYVDGVEVHNAKTKPREEQYNSTYRVVSVLTVLHQDWLNGKEYKCKVSNKALGAPIEKTISKAKGQPREPQVYTLPPIRELMTSNQVSLSCAVKGFYPSDIAVEWESNGQPENNYKTTPPVLDSDGSFFLVSKLTVDKSRWQQGNVFSCSVMHEALHNHYTQKSLSLSPGK

SEQ ID NO: 2185 - protein, 238 aa, synthetic construct; identical to SEQ ID NO: 52
  REGION 1..238: note = Ab0553 HC Knob Fc-6xHis

SEQ ID NO: 2186 - protein, 5 aa, synthetic construct
  REGION 1..5: note = Ab0553 CDR H1
TYAMN

SEQ ID NO: 2187 - protein, 19 aa, synthetic construct
  REGION 1..19: note = Ab0553 CDR H2
RIRSKYNNYATYYADSVKG

SEQ ID NO: 2188 - protein, 14 aa, synthetic construct
  REGION 1..14: note = Ab0553 CDR H3
HGNFGNSYVSWFAY

SEQ ID NO: 2189 - protein, 14 aa, synthetic construct
  REGION 1..14: note = Ab0553 CDR L1
RSSTGAVTTSNYAN

SEQ ID NO: 2190 - protein, 7 aa, synthetic construct
  REGION 1..7: note = Ab0533 CDR L2
GTNKLAS

SEQ ID NO: 2191 - protein, 9 aa, synthetic construct
  REGION 1..9: note = Ab0533 CDR L3
ALWYSNLWV

SEQ ID NO: 2192 - protein, 482 aa, synthetic construct
  REGION 1..482: note = Ab0554 HC Hole scFv-Fc
EVQLVESGGGLVQPGGSLRLSCAASGFTFNTYAMSWVRQAPGKGLEWVARIRSKYNNYATYYADSVKGRFTISRDDSKNTLYLQMNSLRAEDTAVYYCVRHGNFGNSYVSWFAYWGQGTLVTVSSGGGGSGGGGSGGGGSEIVVTQSPATLSLSPGERATLSCRSSTGAVTTSNYANWVQQKPGQAFRGLIGGTNKRATGIPARFSGSLSGTDFTLTISSLEPEDFAVYYCALWYSNLWVFGQGTKLEIKGGGGSDKTHTCPPCPAPEAAGGPSVFLFPPKPKDTLMISRTPEVTCVVVDVSHEDPEVKFNWYVDGVEVHNAKTKPREEQYNSTYRVVSVLTVLHQDWLNGKEYKCKVSNKALGAPIEKTISKAKGQPREPQVYTLPPIRELMTSNQVSLSCAVKGFYPSDIAVEWESNGQPENNYKTTPPVLDSDGSFFLVSKLTVDKSRWQQGNVFSCSVMHEALHNHYTQKSLSLSPGK

SEQ ID NO: 2193 - protein, 238 aa, synthetic construct; identical to SEQ ID NO: 52
  REGION 1..238: note = Ab0554 HC Knob Fc-6xHis

SEQ ID NO: 2194 - protein, 5 aa, synthetic construct
  REGION 1..5: note = Ab0554 CDR H1
TYAMS

SEQ ID NO: 2195 - protein, 19 aa, synthetic construct
  REGION 1..19: note = Ab0554 CDR H2
RIRSKYNNYATYYADSVKG

SEQ ID NO: 2196 - protein, 14 aa, synthetic construct
  REGION 1..14: note = Ab0554 CDR H3
HGNFGNSYVSWFAY

SEQ ID NO: 2197 - protein, 14 aa, synthetic construct
  REGION 1..14: note = Ab0554 CDR L1
RSSTGAVTTSNYAN

SEQ ID NO: 2198 - protein, 7 aa, synthetic construct
  REGION 1..7: note = Ab0554 CDR L2
GTNKRAT

SEQ ID NO: 2199 - protein, 9 aa, synthetic construct
  REGION 1..9: note = Ab0554 CDR L3
ALWYSNLWV

SEQ ID NO: 2200 - protein, 482 aa, synthetic construct
  REGION 1..482: note = Ab0555 HC Hole scFv-Fc
EVQLVESGSELKKPGASVKVSCKASGFTFNTYAMNWVRQAPGQGLEWVARIRSKYNNYATYYADGFTGRFVISRDDSVSILYLQISSLKAEDTAVYYCVRHGNFGNSYVSWFAYWGQGTLVTVSSGGGGSGGGGSGGGGSEIVVTQSPATLSLSPGERATLSCRSSTGAVTTSNYANWVQQKPGQAFRGLIGGTNKRATGIPARFSGSLSGDDATLTISSLEPEDFAVYYCALWYSNLWVFGQGTKLEIKGGGGSDKTHTCPPCPAPEAAGGPSVFLFPPKPKDTLMISRTPEVTCVVVDVSHEDPEVKFNWYVDGVEVHNAKTKPREEQYNSTYRVVSVLTVLHQDWLNGKEYKCKVSNKALGAPIEKTISKAKGQPREPQVYTLPPIRELMTSNQVSLSCAVKGFYPSDIAVEWESNGQPENNYKTTPPVLDSDGSFFLVSKLTVDKSRWQQGNVFSCSVMHEALHNHYTQKSLSLSPGK

SEQ ID NO: 2201 - protein, 238 aa, synthetic construct; identical to SEQ ID NO: 52
  REGION 1..238: note = Ab0555 HC Knob Fc-6xHis

SEQ ID NO: 2202 - protein, 5 aa, synthetic construct
  REGION 1..5: note = Ab0555 CDR H1
TYAMN

SEQ ID NO: 2203 - protein, 19 aa, synthetic construct
  REGION 1..19: note = Ab0555 CDR H2
RIRSKYNNYATYYADGFTG

SEQ ID NO: 2204 - protein, 14 aa, synthetic construct
  REGION 1..14: note = Ab0555 CDR H3
HGNFGNSYVSWFAY

SEQ ID NO: 2205 - protein, 14 aa, synthetic construct
  REGION 1..14: note = Ab0555 CDR L1
RSSTGAVTTSNYAN

SEQ ID NO: 2206 - protein, 7 aa, synthetic construct
  REGION 1..7: note = Ab0555 CDR L2
GTNKRAT

SEQ ID NO: 2207 - protein, 9 aa, synthetic construct
  REGION 1..9: note = Ab0555 CDR L3
ALWYSNLWV

SEQ ID NO: 2208 - protein, 481 aa, synthetic construct
  REGION 1..481: note = Ab0556 HC Hole scFv-Fc
QVQLVQSGSELKKPGASVKVSCKASGFTFNTYAMNWVRQAPGQGLEWMARIRSKYNNYATYYADGFTGRFVFSRDDSVSTLYLQISSLKAEDTAVYYCVRHGNFGNSYVSWFAYWGQGTLVTVSSGGGGSGGGGSGGGGSQAVVTQPPSVSAAPGQKVTISCSSSTGAVTTSNYANWVQQLPGTAFKGLIGGTNKRASGIPDRFSGSLSGDSATLGITGLQTGDEADYYCALWYSNLWVFGGGTKLTVLGGGGSDKTHTCPPCPAPEAAGGPSVFLFPPKPKDTLMISRTPEVTCVVVDVSHEDPEVKFNWYVDGVEVHNAKTKPREEQYNSTYRVVSVLTVLHQDWLNGKEYKCKVSNKALGAPIEKTISKAKGQPREPQVYTLPPIRELMTSNQVSLSCAVKGFYPSDIAVEWESNGQPENNYKTTPPVLDSDGSFFLVSKLTVDKSRWQQGNVFSCSVMHEALHNHYTQKSLSLSPGK

SEQ ID NO: 2209 - protein, 238 aa, synthetic construct; identical to SEQ ID NO: 52
  REGION 1..238: note = Ab0556 HC Knob Fc-6xHis

SEQ ID NO: 2210 - protein, 5 aa, synthetic construct
  REGION 1..5: note = Ab0556 CDR H1
TYAMN

SEQ ID NO: 2211 - protein, 19 aa, synthetic construct
  REGION 1..19: note = Ab0556 CDR H2
RIRSKYNNYATYYADGFTG

SEQ ID NO: 2212 - protein, 14 aa, synthetic construct
  REGION 1..14: note = Ab0556 CDR H2
HGNFGNSYVSWFAY

SEQ ID NO: 2213 - protein, 14 aa, synthetic construct
  REGION 1..14: note = Ab0556 CDR L1
SSSTGAVTTSNYAN

SEQ ID NO: 2214 - protein, 7 aa, synthetic construct
  REGION 1..7: note = Ab0556 CDR L2
GTNKRAS

SEQ ID NO: 2215 - protein, 9 aa, synthetic construct
  REGION 1..9: note = Ab0556 CDR L3
ALWYSNLWV

SEQ ID NO: 2216 - protein, 481 aa, synthetic construct
  REGION 1..481: note = Ab0557 HC Hole scFv-Fc
QVQLVQSGAEVKKPGASVKVSCKASGFTFNTYAMHWVRQAPGQGLEWMARIRSKYNNYATYYADKFQGRVTMTRDDSTSTLYMELSSLRSEDTAVYYCVRHGNFGNSYVSWFAYWGQGTLVTVSSGGGGSGGGGSGGGGSQAVVTQEPSLTVSPGGTVTLTCASSTGAVTTSNYANWVQQKPGQAFRGLIGGTNKKASWTPARFSGSLLGDKAALTLSGVQPEDEAEYYCALWYSNLWVFGGGTKLTVLGGGGSDKTHTCPPCPAPEAAGGPSVFLFPPKPKDTLMISRTPEVTCVVVDVSHEDPEVKFNWYVDGVEVHNAKTKPREEQYNSTYRVVSVLTVLHQDWLNGKEYKCKVSNKALGAPIEKTISKAKGQPREPQVYTLPPIRELMTSNQVSLSCAVKGFYPSDIAVEWESNGQPENNYKTTPPVLDSDGSFFLVSKLTVDKSRWQQGNVFSCSVMHEALHNHYTQKSLSLSPGK

SEQ ID NO: 2217 - protein, 238 aa, synthetic construct; identical to SEQ ID NO: 52
  REGION 1..238: note = Ab0557 HC Knob Fc-6cHis

SEQ ID NO: 2218 - protein, 5 aa, synthetic construct
  REGION 1..5: note = Ab0557 CDR H1
TYAMH

SEQ ID NO: 2219 - protein, 19 aa, synthetic construct
  REGION 1..19: note = Ab0557 CDR H2
RIRSKYNNYATYYADKFQG

SEQ ID NO: 2220 - protein, 14 aa, synthetic construct
  REGION 1..14: note = Ab0557 CDR H3
HGNFGNSYVSWFAY

SEQ ID NO: 2221 - protein, 14 aa, synthetic construct
  REGION 1..14: note = Ab0557 CDR L1
ASSTGAVTTSNYAN

SEQ ID NO: 2222 - protein, 7 aa, synthetic construct
  REGION 1..7: note = Ab0557 CDR L2
GTNKKAS

SEQ ID NO: 2223 - protein, 9 aa, synthetic construct
  REGION 1..9: note = Ab0557 CDR L3
ALWYSNLWV

SEQ ID NO: 2224 - protein, 482 aa, synthetic construct
  REGION 1..482: note = Ab0558 HC Hole scFv-Fc
QVQLVQSGAEVKKPGASVKVSCKASGFTFNTYAMHWVRQAPGQGLEWMARIRSKYNNYATYYADKFQGRVTMTRDDSTSTLYMELSSLRSEDTAVYYCVRHGNFGNSYVSWFAYWGQGTLVTVSSGGGGSGGGGSGGGGSDIQVTQSPSSLSASVGDRVTITCRSSTGAVTTSNYANWVQQKPGKAFKGLIGGTNKLASGVPSRFSGSLSGDDATLTISSLQPEDFATYYCALWYSNLWVFGQGTKLEIKGGGGSDKTHTCPPCPAPEAAGGPSVFLFPPKPKDTLMISRTPEVTCVVVDVSHEDPEVKFNWYVDGVEVHNAKTKPREEQYNSTYRVVSVLTVLHQDWLNGKEYKCKVSNKALGAPIEKTISKAKGQPREPQVYTLPPIRELMTSNQVSLSCAVKGFYPSDIAVEWESNGQPENNYKTTPPVLDSDGSFFLVSKLTVDKSRWQQGNVFSCSVMHEALHNHYTQKSLSLSPGK

SEQ ID NO: 2225 - protein, 238 aa, synthetic construct; identical to SEQ ID NO: 52
  REGION 1..238: note = Ab0558 HC Knob Fc-6xHis

SEQ ID NO: 2226 - protein, 5 aa, synthetic construct
  REGION 1..5: note = Ab0558 CDR H1
TYAMH

SEQ ID NO: 2227 - protein, 19 aa, synthetic construct
  REGION 1..19: note = Ab0558 CDR H2
RIRSKYNNYATYYADKFQG

SEQ ID NO: 2228 - protein, 14 aa, synthetic construct
  REGION 1..14: note = Ab0558 CDR H3
HGNFGNSYVSWFAY

SEQ ID NO: 2229 - protein, 14 aa, synthetic construct
  REGION 1..14: note = Ab0558 CDR L1
RSSTGAVTTSNYAN

SEQ ID NO: 2230 - protein, 7 aa, synthetic construct
  REGION 1..7: note = Ab0558 CDR L2
GTNKLAS

SEQ ID NO: 2231 - protein, 9 aa, synthetic construct
  REGION 1..9: note = Ab0558 CDR L3
ALWYSNLWV

SEQ ID NO: 2232 - protein, 481 aa, synthetic construct
  REGION 1..481: note = Ab0559 HC Hole scFv-Fc
EVQLVESGGGLVQPKGSLKLSCAASGFTFNTYAMNWVRQAPGKGLEWVARIRSKYNNYATYYADSVKDRFTISRDDSQSILYLQMNNLKTEDTAMYYCVRHGNFGNSYVSWFAYWGQGTLVTVSAGGGGSGGGGSGGGGSQAVVTQESALTTSPGETVTLTCRSSTGAVTTSNYANWVQEKPDHLFTGLIGGTNKRAPGVPARFSGSLIGDKAALTITGAQTEDEAIYFCALWYSNLWVFGGGTKLTVLGGGGSDKTHTCPPCPAPEAAGGPSVFLFPPKPKDTLMISRTPEVTCVVVDVSHEDPEVKFNWYVDGVEVHNAKTKPREEQYNSTYRVVSVLTVLHQDWLNGKEYKCKVSNKALGAPIEKTISKAKGQPREPQVYTLPPIRELMTSNQVSLSCAVKGFYPSDIAVEWESNGQPENNYKTTPPVLDSDGSFFLVSKLTVDKSRWQQGNVFSCSVMHEALHNHYTQKSLSLSPGK

SEQ ID NO: 2233 - protein, 238 aa, synthetic construct; identical to SEQ ID NO: 52
  REGION 1..238: note = Ab0559 HC Knob Fc-6xHis

SEQ ID NO: 2234 - protein, 5 aa, synthetic construct
  REGION 1..5: note = Ab0559 CDR H1
TYAMN

SEQ ID NO: 2235 - protein, 19 aa, synthetic construct
  REGION 1..19: note = Ab0559 CDR H2
RIRSKYNNYATYYADSVKD

SEQ ID NO: 2236 - protein, 14 aa, synthetic construct
  REGION 1..14: note = Ab0559 CDR H3
HGNFGNSYVSWFAY

SEQ ID NO: 2237 - protein, 14 aa, synthetic construct
  REGION 1..14: note = Ab0559 CDR L1
RSSTGAVTTSNYAN

SEQ ID NO: 2238 - protein, 7 aa, synthetic construct
  REGION 1..7: note = Ab0559 CDR L2
GTNKRAP

SEQ ID NO: 2239 - protein, 9 aa, synthetic construct
  REGION 1..9: note = Ab0559 CDR L3
ALWYSNLWV

SEQ ID NO: 2240 - protein, 482 aa, synthetic construct
  REGION 1..482: note = Ab0640 HC
EVQLVESGGGLVQPGGSLRLSCAASGFTFNTYAMNWVRQAPGKGLEWVARIRSKYNNYATYYADSVKGRFTISRDDSKSILYLQMNSLRAEDTAVYYCVRHGNFGNSYVSWFAYWGQGTLVTVSSGGGGSGGGGSGGGGSDIQVTQSPSSLSASVGDRVTITCRSSTGAVTTSNYANWVQQKPGKAFKGLIGGTNKLASGVPSRFSGSLSGDDATLTISSLQPEDFATYYCALWYSNLWVFGQGTKLEIKGGGGSDKTHTCPPCPAPEAAGGPSVFLFPPKPKDTLMISRTPEVTCVVVDVSHEDPEVKFNWYVDGVEVHNAKTKPREEQYNSTYRVVSVLTVLHQDWLNGKEYKCKVSNKALGAPIEKTISKAKGQPREPQVYTLPPSRDELTKNQVSLTCLVKGFYPSDIAVEWESNGQPENNYKTTPPVLDSDGSFFLYSKLTVDKSRWQQGNVFSCSVMHEALHNHYTQKSLSLSPGK

SEQ ID NO: 2241 - protein, 5 aa, synthetic construct
  REGION 1..5: note = Ab0640 CDR H1
TYAMN

SEQ ID NO: 2242 - protein, 19 aa, synthetic construct
  REGION 1..19: note = Ab0640 CDR H2
RIRSKYNNYATYYADSVKG

SEQ ID NO: 2243 - protein, 14 aa, synthetic construct
  REGION 1..14: note = Ab0640 CDR H3
HGNFGNSYVSWFAY

SEQ ID NO: 2244 - protein, 14 aa, synthetic construct
  REGION 1..14: note = Ab0640 CDR L1
RSSTGAVTTSNYAN

SEQ ID NO: 2245 - protein, 7 aa, synthetic construct
  REGION 1..7: note = Ab0640 CDR L2
GTNKLAS

SEQ ID NO: 2246 - protein, 9 aa, synthetic construct
  REGION 1..9: note = Ab0640 CDR L3
ALWYSNLWV

SEQ ID NO: 2247 - protein, 482 aa, synthetic construct
  REGION 1..482: note = Ab0679 HC
EVQLVESGGGLVQPGGSLRLSCAASGFTFNTYAMNWVRQAPGKGLEWVGRIRSKYNNYATYYADSVKGRFTISRDDSKSILYLQMNSLRAEDTAVYYCVRHGNFGNSYVSWFAYWGQGTLVTVSSGGGGSGGGGSGGGGSDIQVTQSPSSLSASVGDRVTITCRSSTGAVTTSNYANWVQQKPGKAFKGLIGGTNKLASGVPSRFSGSLSGDDATLTISSLQPEDFATYYCALWYSNLWVFGQGTKLEIKGGGGSDKTHTCPPCPAPEAAGGPSVFLFPPKPKDTLMISRTPEVTCVVVDVSHEDPEVKFNWYVDGVEVHNAKTKPREEQYNSTYRVVSVLTVLHQDWLNGKEYKCKVSNKALGAPIEKTISKAKGQPREPQVYTLPPSRDELTKNQVSLTCLVKGFYPSDIAVEWESNGQPENNYKTTPPVLDSDGSFFLYSKLTVDKSRWQQGNVFSCSVMHEALHNHYTQKSLSLSPGK

SEQ ID NO: 2248 - protein, 5 aa, synthetic construct
  REGION 1..5: note = Ab0769 CDR H1
TYAMN

SEQ ID NO: 2249 - protein, 19 aa, synthetic construct
  REGION 1..19: note = Ab0769 CDR H2
RIRSKYNNYATYYADSVKG

SEQ ID NO: 2250 - protein, 14 aa, synthetic construct
  REGION 1..14: note = Ab0769 CDR H3
HGNFGNSYVSWFAY

SEQ ID NO: 2251 - protein, 14 aa, synthetic construct
  REGION 1..14: note = Ab0769 CDR L1
RSSTGAVTTSNYAN

SEQ ID NO: 2252 - protein, 7 aa, synthetic construct
  REGION 1..7: note = Ab0769 CDR L2
GTNKLAS

SEQ ID NO: 2253 - protein, 9 aa, synthetic construct
  REGION 1..9: note = Ab0769 CDR L3
ALWYSNLWV

SEQ ID NO: 2254 - protein, 482 aa, synthetic construct
  REGION 1..482: note = Ab0770 HC
EVQLVESGGGLVQPGGSLRLSCAASGFTFNTYAMNWVRQAPGKGLEWVARIRSKYNNYATYYADSVKGRFTISRDDSKSILYLQMNSLRAEDTAVYYCVRHKNFGNSYVSWFAYWGQGTLVTVSSGGGGSGGGGSGGGGSDIQVTQSPSSLSASVGDRVTITCRSSTGAVTTSNYANWVQQKPGKAFKGLIGGTNKLASGVPSRFSGSLSGDDATLTISSLQPEDFATYYCALWYSNLWVFGQGTKLEIKGGGGSDKTHTCPPCPAPEAAGGPSVFLFPPKPKDTLMISRTPEVTCVVVDVSHEDPEVKFNWYVDGVEVHNAKTKPREEQYNSTYRVVSVLTVLHQDWLNGKEYKCKVSNKALGAPIEKTISKAKGQPREPQVYTLPPSRDELTKNQVSLTCLVKGFYPSDIAVEWESNGQPENNYKTTPPVLDSDGSFFLYSKLTVDKSRWQQGNVFSCSVMHEALHNHYTQKSLSLSPGK

SEQ ID NO: 2255 - protein, 5 aa, synthetic construct
  REGION 1..5: note = Ab0770 CDR H1
TYAMN

SEQ ID NO: 2256 - protein, 19 aa, synthetic construct
  REGION 1..19: note = Ab0770 CDR H2
RIRSKYNNYATYYADSVKG

SEQ ID NO: 2257 - protein, 14 aa, synthetic construct
  REGION 1..14: note = Ab0770 CDR H3
HKNFGNSYVSWFAY

SEQ ID NO: 2258 - protein, 14 aa, synthetic construct
  REGION 1..14: note = Ab0770 CDR L1
RSSTGAVTTSNYAN

SEQ ID NO: 2259 - protein, 7 aa, synthetic construct
  REGION 1..7: note = Ab0770 CDR L2
GTNKLAS

SEQ ID NO: 2260 - protein, 9 aa, synthetic construct
  REGION 1..9: note = Ab0770 CDR L3
ALWYSNLWV

SEQ ID NO: 2261 - protein, 481 aa, synthetic construct
  REGION 1..481: note = Ab0771 HC
EVQLVESGGGLVQPGGSLRLSCAASGFTFNTYAMNWVRQAPGKGLEWVARIRSKYNNYATYYADSVKGRFTISRDDSKSILYLQMNSLRAEDTAVYYCVRHGNFGNSYVSWFAYWGQGTLVTVSSGGGGSGGGGSGGGGSDIQVTQSSSLSASVGDRVTITCRSSTGAVTTSNYANWVQQKPGKAFKGLIGGTNKLASGVPSRFSGSLSGDDATLTISSLQPEDFATYYCALWYSNLWVFGQGTKLEIKGGGGSDKTHTCPPCPAPEAAGGPSVFLFPPKPKDTLMISRTPEVTCVVVDVSHEDPEVKFNWYVDGVEVHNAKTKPREEQYNSTYRVVSVLTVLHQDWLNGKEYKCKVSNKALGAPIEKTISKAKGQPREPQVYTLPPSRDELTKNQVSLTCLVKGFYPSDIAVEWESNGQPENNYKTTPPVLDSDGSFFLYSKLTVDKSRWQQGNVFSCSVMHEALHNHYTQKSLSLSPGK

SEQ ID NO: 2262 - protein, 5 aa, synthetic construct
  REGION 1..5: note = Ab0771 CDR H1
TYAMN

SEQ ID NO: 2263 - protein, 19 aa, synthetic construct
  REGION 1..19: note = Ab0771 CDR H2
RIRSKYNNYATYYADSVKG

SEQ ID NO: 2264 - protein, 14 aa, synthetic construct
  REGION 1..14: note = Ab0771 CDR H3
HGNFGNSYVSWFAY

SEQ ID NO: 2265 - protein, 14 aa, synthetic construct
  REGION 1..14: note = Ab0771 CDR L1
RSSTGAVTTSNYAN

SEQ ID NO: 2266 - protein, 7 aa, synthetic construct
  REGION 1..7: note = Ab0771 CDR L2
GTNKLAS

SEQ ID NO: 2267 - protein, 9 aa, synthetic construct
  REGION 1..9: note = Ab0771 CDR L3
ALWYSNLWV

SEQ ID NO: 2268 - protein, 482 aa, synthetic construct
  REGION 1..482: note = Ab0772 HC
EVQLVESGGGLVQPGGSLRLSCAASGFTFNTYAMNWVRQAPGKGLEWVARIRSKYNNYATYYADSVKGRFTISRDDSKSILYLQMNSLRAEDTAVYYCVRHGNFGNSYVSWFAYWGQGTLVTVSSGGGGSGGGGSGGGGSDIQVTQSPSSLSASVGDRVTITCRSSTGAVTTSNYANWVQQKPGKAFKGLIGGTNKRASGVPSRFSGSLSGDDATLTISSLQPEDFATYYCALWYSNLWVFGQGTKLEIKGGGGSDKTHTCPPCPAPEAAGGPSVFLFPPKPKDTLMISRTPEVTCVVVDVSHEDPEVKFNWYVDGVEVHNAKTKPREEQYNSTYRVVSVLTVLHQDWLNGKEYKCKVSNKALGAPIEKTISKAKGQPREPQVYTLPPSRDELTKNQVSLTCLVKGFYPSDIAVEWESNGQPENNYKTTPPVLDSDGSFFLYSKLTVDKSRWQQGNVFSCSVMHEALHNHYTQKSLSLSPGK

SEQ ID NO: 2269 - protein, 5 aa, synthetic construct
  REGION 1..5: note = Ab0772 CDR H1
TYAMN

SEQ ID NO: 2270 - protein, 19 aa, synthetic construct
  REGION 1..19: note = Ab772 CDR H2
RIRSKYNNYATYYADSVKG

SEQ ID NO: 2271 - protein, 14 aa, synthetic construct
  REGION 1..14: note = Ab0772 CDR H3
HGNFGNSYVSWFAY

SEQ ID NO: 2272 - protein, 14 aa, synthetic construct
  REGION 1..14: note = Ab0772 CDR L1
RSSTGAVTTSNYAN

SEQ ID NO: 2273 - protein, 7 aa, synthetic construct
  REGION 1..7: note = Ab0772 CDR L2
GTNKRAS

SEQ ID NO: 2274 - protein, 9 aa, synthetic construct
  REGION 1..9: note = Ab0772 CDR L3
ALWYSNLWV

SEQ ID NO: 2275 - protein, 482 aa, synthetic construct
  REGION 1..482: note = Ab0773 HC
EVQLVESGGGLVQPGGSLRLSCAASGFTFNTYAMNWVRQAPGKGLEWVARIRSKYNNYATYYADSVKGRFTISRDDSKSILYLQMNSLRAEDTAVYYCVRHGNFGNSYVSWFAYWGQGTLVTVSSGGGGSGGGGSGGGGSDIQVTQSPSSLSASVGDRVTITCRSSTGAVTTSNYANWVQQKPGKAFKGLIGGTNKLAPGVPSRFSGSLSGDDATLTISSLQPEDFATYYCALWYSNLWVFGQGTKLEIKGGGGSDKTHTCPPCPAPEAAGGPSVFLFPPKPKDTLMISRTPEVTCVVVDVSHEDPEVKFNWYVDGVEVHNAKTKPREEQYNSTYRVVSVLTVLHQDWLNGKEYKCKVSNKALGAPIEKTISKAKGQPREPQVYTLPPSRDELTKNQVSLTCLVKGFYPSDIAVEWESNGQPENNYKTTPPVLDSDGSFFLYSKLTVDKSRWQQGNVFSCSVMHEALHNHYTQKSLSLSPGK

SEQ ID NO: 2276 - protein, 5 aa, synthetic construct
  REGION 1..5: note = Ab0773 CDR H1
TYAMN

SEQ ID NO: 2277 - protein, 19 aa, synthetic construct
  REGION 1..19: note = Ab0773 CDR H2
RIRSKYNNYATYYADSVKG

SEQ ID NO: 2278 - protein, 14 aa, synthetic construct
  REGION 1..14: note = Ab0773 CDR H3
HGNFGNSYVSWFAY

SEQ ID NO: 2279 - protein, 14 aa, synthetic construct
  REGION 1..14: note = Ab0773 CDR L1
RSSTGAVTTSNYAN

SEQ ID NO: 2280 - protein, 7 aa, synthetic construct
  REGION 1..7: note = Ab0773 CDR L2
GTNKLAP

SEQ ID NO: 2281 - protein, 9 aa, synthetic construct
  REGION 1..9: note = Ab0773 CDR L3
ALWYSNLWV

SEQ ID NO: 2282 - protein, 482 aa, synthetic construct
  REGION 1..482: note = Ab0774 HC
EVQLVESGGGLVQPGGSLRLSCAASGFTFNTYAMNWVRQAPGKGLEWVARIRSKYNNYATYYADSVKGRFTISRDDSKSILYLQMNSLRAEDTAVYYCVRHGNFGNSYVSWFAYWGQGTLVTVSSGGGGSGGGGSGGGGSDIQVTQSPSSLSASVGDRVTITCRSSTGAVTTSNYANWVQQKPGKAFKGLIGGTNKRAPGVPSRFSGSLSGDDATLTISSLQPEDFATYYCALWYSNLWVFGQGTKLEIKGGGGSDKTHTCPPCPAPEAAGGPSVFLFPPKPKDTLMISRTPEVTCVVVDVSHEDPEVKFNWYVDGVEVHNAKTKPREEQYNSTYRVVSVLTVLHQDWLNGKEYKCKVSNKALGAPIEKTISKAKGQPREPQVYTLPPSRDELTKNQVSLTCLVKGFYPSDIAVEWESNGQPENNYKTTPPVLDSDGSFFLYSKLTVDKSRWQQGNVFSCSVMHEALHNHYTQKSLSLSPGK

SEQ ID NO: 2283 - protein, 5 aa, synthetic construct
  REGION 1..5: note = Ab0774 CDR H1
TYAMN

SEQ ID NO: 2284 - protein, 19 aa, synthetic construct
  REGION 1..19: note = Ab0774 CDR H2
RIRSKYNNYATYYADSVKG

SEQ ID NO: 2285 - protein, 14 aa, synthetic construct
  REGION 1..14: note = Ab0774 CDR H3
HGNFGNSYVSWFAY

SEQ ID NO: 2286 - protein, 14 aa, synthetic construct
  REGION 1..14: note = Ab0774 CDR L1
RSSTGAVTTSNYAN

SEQ ID NO: 2287 - protein, 7 aa, synthetic construct
  REGION 1..7: note = Ab0774 CDR L2
GTNKRAP

SEQ ID NO: 2288 - protein, 9 aa, synthetic construct
  REGION 1..9: note = Ab0774 CDR L3
ALWYSNLWV

SEQ ID NO: 2289 - protein, 482 aa, synthetic construct
  REGION 1..482: note = Ab0775 HC
EVQLVESGGGLVQPGGSLRLSCAASGFTFNTYAMNWVRQAPGKGLEWVGRIRSKYNNYATYYADSVKGRFTISRDDSKSILYLQMNSLRAEDTAVYYCVRHGNFGNSYVSWFAYWGQGTLVTVSSGGGGSGGGGSGGGGSDIQVTQSPSSLSASVGDRVTITCRSSTGAVTTSNYANWVQQKPGKAFKGLIGGTNKRAPGVPSRFSGSLSGDDATLTISSLQPEDFATYYCALWYSNLWVFGQGTKLEIKGGGGSDKTHTCPPCPAPEAAGGPSVFLFPPKPKDTLMISRTPEVTCVVVDVSHEDPEVKFNWYVDGVEVHNAKTKPREEQYNSTYRVVSVLTVLHQDWLNGKEYKCKVSNKALGAPIEKTISKAKGQPREPQVYTLPPSRDELTKNQVSLTCLVKGFYPSDIAVEWESNGQPENNYKTTPPVLDSDGSFFLYSKLTVDKSRWQQGNVFSCSVMHEALHNHYTQKSLSLSPGK

SEQ ID NO: 2290 - protein, 5 aa, synthetic construct
  REGION 1..5: note = Ab0775 CDR H1
TYAMN

SEQ ID NO: 2291 - protein, 19 aa, synthetic construct
  REGION 1..19: note = Ab0775 CDR H2
RIRSKYNNYATYYADSVKG

SEQ ID NO: 2292 - protein, 14 aa, synthetic construct
  REGION 1..14: note = Ab0775 CDR H3
HGNFGNSYVSWFAY

SEQ ID NO: 2293 - protein, 14 aa, synthetic construct
  REGION 1..14: note = Ab0775 CDR L1
RSSTGAVTTSNYAN

SEQ ID NO: 2294 - protein, 7 aa, synthetic construct
  REGION 1..7: note = Ab0775 CDR L2
GTNKRAP

SEQ ID NO: 2295 - protein, 9 aa, synthetic construct
  REGION 1..9: note = Ab0775 CDR L3
ALWYSNLWV

SEQ ID NO: 2296 - protein, 482 aa, synthetic construct
  REGION 1..482: note = Ab0776 HC
EVQLVESGGGLVQPGGSLRLSCAASGFTFNTYAMNWVRQAPGKGLEWVARIRSKYNNYATYYADSVKGRFTISRDDSKSILYLQMNSLRAEDTAVYYCVRHKNFGNSYVSWFAYWGQGTLVTVSSGGGGSGGGGSGGGGSDIQVTQSPSSLSASVGDRVTITCRSSTGAVTTSNYANWVQQKPGKAFKGLIGGTNKRAPGVPSRFSGSLSGDDATLTISSLQPEDFATYYCALWYSNLWVFGQGTKLEIKGGGGSDKTHTCPPCPAPEAAGGPSVFLFPPKPKDTLMISRTPEVTCVVVDVSHEDPEVKFNWYVDGVEVHNAKTKPREEQYNSTYRVVSVLTVLHQDWLNGKEYKCKVSNKALGAPIEKTISKAKGQPREPQVYTLPPSRDELTKNQVSLTCLVKGFYPSDIAVEWESNGQPENNYKTTPPVLDSDGSFFLYSKLTVDKSRWQQGNVFSCSVMHEALHNHYTQKSLSLSPGK

SEQ ID NO: 2297 - protein, 5 aa, synthetic construct
  REGION 1..5: note = Ab0776 CDR H1
TYAMN

SEQ ID NO: 2298 - protein, 19 aa, synthetic construct
  REGION 1..19: note = Ab0776 CDR H2
RIRSKYNNYATYYADSVKG

SEQ ID NO: 2299 - protein, 14 aa, synthetic construct
  REGION 1..14: note = Ab0776 CDR H3
HKNFGNSYVSWFAY

SEQ ID NO: 2300 - protein, 14 aa, synthetic construct
  REGION 1..14: note = Ab0776 CDR L1
RSSTGAVTTSNYAN

SEQ ID NO: 2301 - protein, 7 aa, synthetic construct
  REGION 1..7: note = Ab0776 CDR L2
GTNKRAP

SEQ ID NO: 2302 - protein, 9 aa, synthetic construct
  REGION 1..9: note = Ab0776 CDR L3
ALWYSNLWV

SEQ ID NO: 2303 - protein, 482 aa, synthetic construct
  REGION 1..482: note = Ab0907 HC
EVQLVESGGGLVQPGGSLRLSCAASGFTFSTYAMNWVRQAPGKGLEWVARIRSKYNNYATYYADSVKGRFTISRDDSKSILYLQMNSLRAEDTAVYYCVRHGNFGNSYVSWFAYWGQGTLVTVSSGGGGSGGGGSGGGGSDIQVTQSPSSLSASVGDRVTITCRSSTGAVTTSNYANWVQQKPGKAFKGLIGGTNKRAPGVPSRFSGSLSGDDATLTISSLQPEDFATYYCALWYSNLWVFGQGTKLEIKGGGGSDKTHTCPPCPAPEAAGGPSVFLFPPKPKDTLMISRTPEVTCVVVDVSHEDPEVKFNWYVDGVEVHNAKTKPREEQYNSTYRVVSVLTVLHQDWLNGKEYKCKVSNKALGAPIEKTISKAKGQPREPQVYTLPPSRDELTKNQVSLTCLVKGFYPSDIAVEWESNGQPENNYKTTPPVLDSDGSFFLYSKLTVDKSRWQQGNVFSCSVMHEALHNHYTQKSLSLSPGK

SEQ ID NO: 2304 - protein, 5 aa, synthetic construct
  REGION 1..5: note = Ab0907 CDR H1
TYAMN

SEQ ID NO: 2305 - protein, 19 aa, synthetic construct
  REGION 1..19: note = Ab0907 CDR H2
RIRSKYNNYATYYADSVKG

SEQ ID NO: 2306 - protein, 14 aa, synthetic construct
  REGION 1..14: note = Ab0907 CDR H3
HGNFGNSYVSWFAY

SEQ ID NO: 2307 - protein, 14 aa, synthetic construct
  REGION 1..14: note = Ab0907 CDR L1
RSSTGAVTTSNYAN

SEQ ID NO: 2308 - protein, 7 aa, synthetic construct
  REGION 1..7: note = Ab0907 CDR L2
GTNKRAP

SEQ ID NO: 2309 - protein, 9 aa, synthetic construct
  REGION 1..9: note = Ab0907 CDR L3
ALWYSNLWV

SEQ ID NO: 2310 - protein, 482 aa, synthetic construct
  REGION 1..482: note = Ab0908 HC
EVQLVESGGGLVQPGGSLRLSCAASGFTFNAYAMNWVRQAPGKGLEWVARIRSKYNNYATYYADSVKGRFTISRDDSKSILYLQMNSLRAEDTAVYYCVRHGNFGNSYVSWFAYWGQGTLVTVSSGGGGSGGGGSGGGGSDIQVTQSPSSLSASVGDRVTITCRSSTGAVTTSNYANWVQQKPGKAFKGLIGGTNKRAPGVPSRFSGSLSGDDATLTISSLQPEDFATYYCALWYSNLWVFGQGTKLEIKGGGGSDKTHTCPPCPAPEAAGGPSVFLFPPKPKDTLMISRTPEVTCVVVDVSHEDPEVKFNWYVDGVEVHNAKTKPREEQYNSTYRVVSVLTVLHQDWLNGKEYKCKVSNKALGAPIEKTISKAKGQPREPQVYTLPPSRDELTKNQVSLTCLVKGFYPSDIAVEWESNGQPENNYKTTPPVLDSDGSFFLYSKLTVDKSRWQQGNVFSCSVMHEALHNHYTQKSLSLSPGK

SEQ ID NO: 2311 - protein, 5 aa, synthetic construct
  REGION 1..5: note = Ab0908 CDR H1
AYAMN

SEQ ID NO: 2312 - protein, 19 aa, synthetic construct
  REGION 1..19: note = Ab0908 CDR H2
RIRSKYNNYATYYADSVKG

SEQ ID NO: 2313 - protein, 14 aa, synthetic construct
  REGION 1..14: note = Ab0908 CDR H3
HGNFGNSYVSWFAY

SEQ ID NO: 2314 - protein, 14 aa, synthetic construct
  REGION 1..14: note = Ab0908 CDR L1
RSSTGAVTTSNYAN

SEQ ID NO: 2315 - protein, 7 aa, synthetic construct
  REGION 1..7: note = Ab0908 CDR L2
GTNKRAP

SEQ ID NO: 2316 - protein, 9 aa, synthetic construct
  REGION 1..9: note = Ab0908 CDR L3
ALWYSNLWV

SEQ ID NO: 2317 - protein, 482 aa, synthetic construct
  REGION 1..482: note = Ab0909 HC
EVQLVESGGGLVQPGGSLRLSCAASGFTFNTAAMNWVRQAPGKGLEWVARIRSKYNNYATYYADSVKGRFTISRDDSKSILYLQMNSLRAEDTAVYYCVRHGNFGNSYVSWFAYWGQGTLVTVSSGGGGSGGGGSGGGGSDIQVTQSPSSLSASVGDRVTITCRSSTGAVTTSNYANWVQQKPGKAFKGLIGGTNKRAPGVPSRFSGSLSGDDATLTISSLQPEDFATYYCALWYSNLWVFGQGTKLEIKGGGGSDKTHTCPPCPAPEAAGGPSVFLFPPKPKDTLMISRTPEVTCVVVDVSHEDPEVKFNWYVDGVEVHNAKTKPREEQYNSTYRVVSVLTVLHQDWLNGKEYKCKVSNKALGAPIEKTISKAKGQPREPQVYTLPPSRDELTKNQVSLTCLVKGFYPSDIAVEWESNGQPENNYKTTPPVLDSDGSFFLYSKLTVDKSRWQQGNVFSCSVMHEALHNHYTQKSLSLSPGK

SEQ ID NO: 2318 - protein, 5 aa, synthetic construct
  REGION 1..5: note = Ab0909 CDR H1
TAAMN

SEQ ID NO: 2319 - protein, 19 aa, synthetic construct
  REGION 1..19: note = Ab0909 CDR H2
RIRSKYNNYATYYADSVKG

SEQ ID NO: 2320 - protein, 14 aa, synthetic construct
  REGION 1..14: note = Ab0909 CDR H3
HGNFGNSYVSWFAY

SEQ ID NO: 2321 - protein, 14 aa, synthetic construct
  REGION 1..14: note = Ab0909 CDR L1
RSSTGAVTTSNYAN

SEQ ID NO: 2322 - protein, 7 aa, synthetic construct
  REGION 1..7: note = Ab0909 CDR L2
GTNKRAP

SEQ ID NO: 2323 - protein, 9 aa, synthetic construct
  REGION 1..9: note = Ab0909 CDR L3
ALWYSNLWV

SEQ ID NO: 2324 - protein, 482 aa, synthetic construct
  REGION 1..482: note = Ab0910 HC
EVQLVESGGGLVQPGGSLRLSCAASGFTFNTYAMNWVRQAPGKGLEWVARIASKYNNYATYYADSVKGRFTISRDDSKSILYLQMNSLRAEDTAVYYCVRHGNFGNSYVSWFAYWGQGTLVTVSSGGGGSGGGGSGGGGSDIQVTQSPSSLSASVGDRVTITCRSSTGAVTTSNYANWVQQKPGKAFKGLIGGTNKRAPGVPSRFSGSLSGDDATLTISSLQPEDFATYYCALWYSNLWVFGQGTKLEIKGGGGSDKTHTCPPCPAPEAAGGPSVFLFPPKPKDTLMISRTPEVTCVVVDVSHEDPEVKFNWYVDGVEVHNAKTKPREEQYNSTYRVVSVLTVLHQDWLNGKEYKCKVSNKALGAPIEKTISKAKGQPREPQVYTLPPSRDELTKNQVSLTCLVKGFYPSDIAVEWESNGQPENNYKTTPPVLDSDGSFFLYSKLTVDKSRWQQGNVFSCSVMHEALHNHYTQKSLSLSPGK

SEQ ID NO: 2325 - protein, 5 aa, synthetic construct
  REGION 1..5: note = Ab0910 CDR H1
TYAMN

SEQ ID NO: 2326 - protein, 19 aa, synthetic construct
  REGION 1..19: note = Ab0910 CDR H2
RIASKYNNYATYYADSVKG

SEQ ID NO: 2327 - protein, 14 aa, synthetic construct
  REGION 1..14: note = Ab0910 CDR H3
HGNFGNSYVSWFAY

SEQ ID NO: 2328 - protein, 14 aa, synthetic construct
  REGION 1..14: note = Ab0910 CDR L1
RSSTGAVTTSNYAN

SEQ ID NO: 2329 - protein, 7 aa, synthetic construct
  REGION 1..7: note = Ab0910 CDR L2
GTNKRAP

SEQ ID NO: 2330 - protein, 9 aa, synthetic construct
  REGION 1..9: note = Ab910 CDR L3
ALWYSNLWV

SEQ ID NO: 2331 - protein, 482 aa, synthetic construct
  REGION 1..482: note = Ab0911 HC
EVQLVESGGGLVQPGGSLRLSCAASGFTFNTYAMNWVRQAPGKGLEWVARIRSKYSNYATYYADSVKGRFTISRDDSKSILYLQMNSLRAEDTAVYYCVRHGNFGNSYVSWFAYWGQGTLVTVSSGGGGSGGGGSGGGGSDIQVTQSPSSLSASVGDRVTITCRSSTGAVTTSNYANWVQQKPGKAFKGLIGGTNKRAPGVPSRFSGSLSGDDATLTISSLQPEDFATYYCALWYSNLWVFGQGTKLEIKGGGGSDKTHTCPPCPAPEAAGGPSVFLFPPKPKDTLMISRTPEVTCVVVDVSHEDPEVKFNWYVDGVEVHNAKTKPREEQYNSTYRVVSVLTVLHQDWLNGKEYKCKVSNKALGAPIEKTISKAKGQPREPQVYTLPPSRDELTKNQVSLTCLVKGFYPSDIAVEWESNGQPENNYKTTPPVLDSDGSFFLYSKLTVDKSRWQQGNVFSCSVMHEALHNHYTQKSLSLSPGK

SEQ ID NO: 2332 - protein, 5 aa, synthetic construct
  REGION 1..5: note = Ab0911 CDR H1
TYAMN

SEQ ID NO: 2333 - protein, 19 aa, synthetic construct
  REGION 1..19: note = Ab0911 CDR H2
RIRSKYSNYATYYADSVKG

SEQ ID NO: 2334 - protein, 14 aa, synthetic construct
  REGION 1..14: note = Ab0911 CDR H3
HGNFGNSYVSWFAY

SEQ ID NO: 2335 - protein, 14 aa, synthetic construct
  REGION 1..14: note = Ab0911 CDR L1
RSSTGAVTTSNYAN

SEQ ID NO: 2336 - protein, 7 aa, synthetic construct
  REGION 1..7: note = Ab0911 CDR L2
GTNKRAP

SEQ ID NO: 2337 - protein, 9 aa, synthetic construct
  REGION 1..9: note = Ab0911 CDR L3
ALWYSNLWV

SEQ ID NO: 2338 - protein, 482 aa, synthetic construct
  REGION 1..482: note = Ab0912 HC
EVQLVESGGGLVQPGGSLRLSCAASGFTFNTYAMNWVRQAPGKGLEWVARIRSKYQNYATYYADSVKGRFTISRDDSKSILYLQMNSLRAEDTAVYYCVRHGNFGNSYVSWFAYWGQGTLVTVSSGGGGSGGGGSGGGGSDIQVTQSPSSLSASVGDRVTITCRSSTGAVTTSNYANWVQQKPGKAFKGLIGGTNKRAPGVPSRFSGSLSGDDATLTISSLQPEDFATYYCALWYSNLWVFGQGTKLEIKGGGGSDKTHTCPPCPAPEAAGGPSVFLFPPKPKDTLMISRTPEVTCVVVDVSHEDPEVKFNWYVDGVEVHNAKTKPREEQYNSTYRVVSVLTVLHQDWLNGKEYKCKVSNKALGAPIEKTISKAKGQPREPQVYTLPPSRDELTKNQVSLTCLVKGFYPSDIAVEWESNGQPENNYKTTPPVLDSDGSFFLYSKLTVDKSRWQQGNVFSCSVMHEALHNHYTQKSLSLSPGK

SEQ ID NO: 2339 - protein, 5 aa, synthetic construct
  REGION 1..5: note = Ab0912 CDR H1
TYAMN

SEQ ID NO: 2340 - protein, 19 aa, synthetic construct
  REGION 1..19: note = Ab0912 CDR H2
RIRSKYQNYATYYADSVKG

SEQ ID NO: 2341 - protein, 14 aa, synthetic construct
  REGION 1..14: note = Ab912 CDR H3
HGNFGNSYVSWFAY

SEQ ID NO: 2342 - protein, 14 aa, synthetic construct
  REGION 1..14: note = Ab0912 CDR L1
RSSTGAVTTSNYAN

SEQ ID NO: 2343 - protein, 7 aa, synthetic construct
  REGION 1..7: note = Ab0912 CDR L2
GTNKRAP

SEQ ID NO: 2344 - protein, 9 aa, synthetic construct
  REGION 1..9: note = Ab0912 CDR L3
ALWYSNLWV

SEQ ID NO: 2345 - protein, 482 aa, synthetic construct
  REGION 1..482: note = Ab0913 HC
EVQLVESGGGLVQPGGSLRLSCAASGFTFNTYAMNWVRQAPGKGLEWVARIRSKYNAYATYYADSVKGRFTISRDDSKSILYLQMNSLRAEDTAVYYCVRHGNFGNSYVSWFAYWGQGTLVTVSSGGGGSGGGGSGGGGSDIQVTQSPSSLSASVGDRVTITCRSSTGAVTTSNYANWVQQKPGKAFKGLIGGTNKRAPGVPSRFSGSLSGDDATLTISSLQPEDFATYYCALWYSNLWVFGQGTKLEIKGGGGSDKTHTCPPCPAPEAAGGPSVFLFPPKPKDTLMISRTPEVTCVVVDVSHEDPEVKFNWYVDGVEVHNAKTKPREEQYNSTYRVVSVLTVLHQDWLNGKEYKCKVSNKALGAPIEKTISKAKGQPREPQVYTLPPSRDELTKNQVSLTCLVKGFYPSDIAVEWESNGQPENNYKTTPPVLDSDGSFFLYSKLTVDKSRWQQGNVFSCSVMHEALHNHYTQKSLSLSPGK

SEQ ID NO: 2346 - protein, 5 aa, synthetic construct
  REGION 1..5: note = Ab0913 CDR H1
TYAMN

SEQ ID NO: 2347 - protein, 19 aa, synthetic construct
  REGION 1..19: note = Ab0913 CDR H2
RIRSKYNAYATYYADSVKG

SEQ ID NO: 2348 - protein, 14 aa, synthetic construct
  REGION 1..14: note = Ab0913 CDR H3
HGNFGNSYVSWFAY

SEQ ID NO: 2349 - protein, 14 aa, synthetic construct
  REGION 1..14: note = Ab0913 CDR L1
RSSTGAVTTSNYAN

SEQ ID NO: 2350 - protein, 7 aa, synthetic construct
  REGION 1..7: note = Ab0913 CDR L2
GTNKRAP

SEQ ID NO: 2351 - protein, 9 aa, synthetic construct
  REGION 1..9: note = Ab0913 CDR L3
ALWYSNLWV

SEQ ID NO: 2352 - protein, 482 aa, synthetic construct
  REGION 1..482: note = Ab0914 HC
EVQLVESGGGLVQPGGSLRLSCAASGFTFNTYAMNWVRQAPGKGLEWVARIRSKYNQYATYYADSVKGRFTISRDDSKSILYLQMNSLRAEDTAVYYCVRHGNFGNSYVSWFAYWGQGTLVTVSSGGGGSGGGGSGGGGSDIQVTQSPSSLSASVGDRVTITCRSSTGAVTTSNYANWVQQKPGKAFKGLIGGTNKRAPGVPSRFSGSLSGDDATLTISSLQPEDFATYYCALWYSNLWVFGQGTKLEIKGGGGSDKTHTCPPCPAPEAAGGPSVFLFPPKPKDTLMISRTPEVTCVVVDVSHEDPEVKFNWYVDGVEVHNAKTKPREEQYNSTYRVVSVLTVLHQDWLNGKEYKCKVSNKALGAPIEKTISKAKGQPREPQVYTLPPSRDELTKNQVSLTCLVKGFYPSDIAVEWESNGQPENNYKTTPPVLDSDGSFFLYSKLTVDKSRWQQGNVFSCSVMHEALHNHYTQKSLSLSPGK

SEQ ID NO: 2353 - protein, 5 aa, synthetic construct
  REGION 1..5: note = Ab0914 CDR H1
TYAMN

SEQ ID NO: 2354 - protein, 19 aa, synthetic construct
  REGION 1..19: note = Ab0914 CDR H2
RIRSKYNQYATYYADSVKG

SEQ ID NO: 2355 - protein, 14 aa, synthetic construct
  REGION 1..14: note = Ab0914 CDR H3
HGNFGNSYVSWFAY

SEQ ID NO: 2356 - protein, 14 aa, synthetic construct
  REGION 1..14: note = Ab0914 CDR L1
RSSTGAVTTSNYAN

SEQ ID NO: 2357 - protein, 7 aa, synthetic construct
  REGION 1..7: note = Ab0914 CDR L2
GTNKRAP

SEQ ID NO: 2358 - protein, 9 aa, synthetic construct
  REGION 1..9: note = Ab0914 CDR L3
ALWYSNLWV

SEQ ID NO: 2359 - protein, 482 aa, synthetic construct
  REGION 1..482: note = Ab0915 HC
EVQLVESGGGLVQPGGSLRLSCAASGFTFNTYAMNWVRQAPGKGLEWVARIRSKYNNYATYYADSVKGRFTISRDDSKSILYLQMNSLRAEDTAVYYCVRHGNFGSSYVSWFAYWGQGTLVTVSSGGGGSGGGGSGGGGSDIQVTQSPSSLSASVGDRVTITCRSSTGAVTTSNYANWVQQKPGKAFKGLIGGTNKRAPGVPSRFSGSLSGDDATLTISSLQPEDFATYYCALWYSNLWVFGQGTKLEIKGGGGSDKTHTCPPCPAPEAAGGPSVFLFPPKPKDTLMISRTPEVTCVVVDVSHEDPEVKFNWYVDGVEVHNAKTKPREEQYNSTYRVVSVLTVLHQDWLNGKEYKCKVSNKALGAPIEKTISKAKGQPREPQVYTLPPSRDELTKNQVSLTCLVKGFYPSDIAVEWESNGQPENNYKTTPPVLDSDGSFFLYSKLTVDKSRWQQGNVFSCSVMHEALHNHYTQKSLSLSPGK

SEQ ID NO: 2360 - protein, 5 aa, synthetic construct
  REGION 1..5: note = Ab0915 CDR H1
TYAMN

SEQ ID NO: 2361 - protein, 19 aa, synthetic construct
  REGION 1..19: note = Ab0915 CDR H2
RIRSKYNNYATYYADSVKG

SEQ ID NO: 2362 - protein, 14 aa, synthetic construct
  REGION 1..14: note = Ab0915 CDR H3
HGNFGSSYVSWFAY

SEQ ID NO: 2363 - protein, 14 aa, synthetic construct
  REGION 1..14: note = Ab0915 CDR L1
RSSTGAVTTSNYAN

SEQ ID NO: 2364 - protein, 7 aa, synthetic construct
  REGION 1..7: note = Ab0915 CDR L2
GTNKRAP

SEQ ID NO: 2365 - protein, 9 aa, synthetic construct
  REGION 1..9: note = Ab0915 CDR L3
ALWYSNLWV

SEQ ID NO: 2366 - protein, 482 aa, synthetic construct
  REGION 1..482: note = Ab0916 HC
EVQLVESGGGLVQPGGSLRLSCAASGFTFNTYAMNWVRQAPGKGLEWVARIRSKYNNYATYYADSVKGRFTISRDDSKSILYLQMNSLRAEDTAVYYCVRHGNFGQSYVSWFAYWGQGTLVTVSSGGGGSGGGGSGGGGSDIQVTQSPSSLSASVGDRVTITCRSSTGAVTTSNYANWVQQKPGKAFKGLIGGTNKRAPGVPSRFSGSLSGDDATLTISSLQPEDFATYYCALWYSNLWVFGQGTKLEIKGGGGSDKTHTCPPCPAPEAAGGPSVFLFPPKPKDTLMISRTPEVTCVVVDVSHEDPEVKFNWYVDGVEVHNAKTKPREEQYNSTYRVVSVLTVLHQDWLNGKEYKCKVSNKALGAPIEKTISKAKGQPREPQVYTLPPSRDELTKNQVSLTCLVKGFYPSDIAVEWESNGQPENNYKTTPPVLDSDGSFFLYSKLTVDKSRWQQGNVFSCSVMHEALHNHYTQKSLSLSPGK

SEQ ID NO: 2367 - protein, 5 aa, synthetic construct
  REGION 1..5: note = Ab0916 CDR H1
TYAMN

SEQ ID NO: 2368 - protein, 19 aa, synthetic construct
  REGION 1..19: note = Ab0916 CDR H2
RIRSKYNNYATYYADSVKG

SEQ ID NO: 2369 - protein, 14 aa, synthetic construct
  REGION 1..14: note = Ab0916 CDR H3
HGNFGQSYVSWFAY

SEQ ID NO: 2370 - protein, 14 aa, synthetic construct
  REGION 1..14: note = Ab0916 CDR L1
RSSTGAVTTSNYAN

SEQ ID NO: 2371 - protein, 7 aa, synthetic construct
  REGION 1..7: note = Ab0916 CDR L2
GTNKRAP

SEQ ID NO: 2372 - protein, 9 aa, synthetic construct
  REGION 1..9: note = Ab0916 CDR L3
ALWYSNLWV

SEQ ID NO: 2373 - protein, 482 aa, synthetic construct
  REGION 1..482: note = Ab0917 HC
EVQLVESGGGLVQPGGSLRLSCAASGFTFNTYAMNWVRQAPGKGLEWVARIRSKYNNYATYYADSVKGRFTISRDDSKSILYLQMNSLRAEDTAVYYCVRHGNFGNAYVSWFAYWGQGTLVTVSSGGGGSGGGGSGGGGSDIQVTQSPSSLSASVGDRVTITCRSSTGAVTTSNYANWVQQKPGKAFKGLIGGTNKRAPGVPSRFSGSLSGDDATLTISSLQPEDFATYYCALWYSNLWVFGQGTKLEIKGGGGSDKTHTCPPCPAPEAAGGPSVFLFPPKPKDTLMISRTPEVTCVVVDVSHEDPEVKFNWYVDGVEVHNAKTKPREEQYNSTYRVVSVLTVLHQDWLNGKEYKCKVSNKALGAPIEKTISKAKGQPREPQVYTLPPSRDELTKNQVSLTCLVKGFYPSDIAVEWESNGQPENNYKTTPPVLDSDGSFFLYSKLTVDKSRWQQGNVFSCSVMHEALHNHYTQKSLSLSPGK

SEQ ID NO: 2374 - protein, 5 aa, synthetic construct
  REGION 1..5: note = Ab0917 CD RH1
TYAMN

SEQ ID NO: 2375 - protein, 19 aa, synthetic construct
  REGION 1..19: note = Ab0917 CDR H2
RIRSKYNNYATYYADSVKG

SEQ ID NO: 2376 - protein, 14 aa, synthetic construct
  REGION 1..14: note = Ab0917 CDR H3
HGNFGNAYVSWFAY

SEQ ID NO: 2377 - protein, 14 aa, synthetic construct
  REGION 1..14: note = Ab0917 CDR L1
RSSTGAVTTSNYAN

SEQ ID NO: 2378 - protein, 7 aa, synthetic construct
  REGION 1..7: note = Ab0917 CDR L2
GTNKRAP

SEQ ID NO: 2379 - protein, 9 aa, synthetic construct
  REGION 1..9: note = Ab0917 CDR L3
ALWYSNLWV

SEQ ID NO: 2380 - protein, 482 aa, synthetic construct
  REGION 1..482: note = Ab0918 HC
EVQLVESGGGLVQPGGSLRLSCAASGFTFNTYAMNWVRQAPGKGLEWVARIRSKYNNYATYYADSVKGRFTISRDDSKSILYLQMNSLRAEDTAVYYCVRHGNFGNSAVSWFAYWGQGTLVTVSSGGGGSGGGGSGGGGSDIQVTQSPSSLSASVGDRVTITCRSSTGAVTTSNYANWVQQKPGKAFKGLIGGTNKRAPGVPSRFSGSLSGDDATLTISSLQPEDFATYYCALWYSNLWVFGQGTKLEIKGGGGSDKTHTCPPCPAPEAAGGPSVFLFPPKPKDTLMISRTPEVTCVVVDVSHEDPEVKFNWYVDGVEVHNAKTKPREEQYNSTYRVVSVLTVLHQDWLNGKEYKCKVSNKALGAPIEKTISKAKGQPREPQVYTLPPSRDELTKNQVSLTCLVKGFYPSDIAVEWESNGQPENNYKTTPPVLDSDGSFFLYSKLTVDKSRWQQGNVFSCSVMHEALHNHYTQKSLSLSPGK

SEQ ID NO: 2381 - protein, 5 aa, synthetic construct
  REGION 1..5: note = Ab0918 CDR H1
TYAMN

SEQ ID NO: 2382 - protein, 19 aa, synthetic construct
  REGION 1..19: note = Ab0918 CDR H2
RIRSKYNNYATYYADSVKG

SEQ ID NO: 2383 - protein, 14 aa, synthetic construct
  REGION 1..14: note = Ab0918 CDR H3
HGNFGNSAVSWFAY

SEQ ID NO: 2384 - protein, 14 aa, synthetic construct
  REGION 1..14: note = Ab0918 CDR L1
RSSTGAVTTSNYAN

SEQ ID NO: 2385 - protein, 7 aa, synthetic construct
  REGION 1..7: note = Ab0918 CDR L2
GTNKRAP

SEQ ID NO: 2386 - protein, 9 aa, synthetic construct
  REGION 1..9: note = Ab0918 CDR L3
ALWYSNLWV

SEQ ID NO: 2387 - protein, 482 aa, synthetic construct
  REGION 1..482: note = Ab0919 HC
EVQLVESGGGLVQPGGSLRLSCAASGFTFNTYAMNWVRQAPGKGLEWVARIRSKYNNYATYYADSVKGRFTISRDDSKSILYLQMNSLRAEDTAVYYCVRHGNFGNSYASWFAYWGQGTLVTVSSGGGGSGGGGSGGGGSDIQVTQSPSSLSASVGDRVTITCRSSTGAVTTSNYANWVQQKPGKAFKGLIGGTNKRAPGVPSRFSGSLSGDDATLTISSLQPEDFATYYCALWYSNLWVFGQGTKLEIKGGGGSDKTHTCPPCPAPEAAGGPSVFLFPPKPKDTLMISRTPEVTCVVVDVSHEDPEVKFNWYVDGVEVHNAKTKPREEQYNSTYRVVSVLTVLHQDWLNGKEYKCKVSNKALGAPIEKTISKAKGQPREPQVYTLPPSRDELTKNQVSLTCLVKGFYPSDIAVEWESNGQPENNYKTTPPVLDSDGSFFLYSKLTVDKSRWQQGNVFSCSVMHEALHNHYTQKSLSLSPGK

SEQ ID NO: 2388 - protein, 5 aa, synthetic construct
  REGION 1..5: note = Ab0919 CDR H1
TYAMN

SEQ ID NO: 2389 - protein, 19 aa, synthetic construct
  REGION 1..19: note = Ab0919 CDR H2
RIRSKYNNYATYYADSVKG

SEQ ID NO: 2390 - protein, 14 aa, synthetic construct
  REGION 1..14: note = Ab0919 CDR H3
HGNFGNSYASWFAY

SEQ ID NO: 2391 - protein, 14 aa, synthetic construct
  REGION 1..14: note = Ab0919 CDR L1
RSSTGAVTTSNYAN

SEQ ID NO: 2392 - protein, 7 aa, synthetic construct
  REGION 1..7: note = Ab0919 CDR L2
GTNKRAP

SEQ ID NO: 2393 - protein, 9 aa, synthetic construct
  REGION 1..9: note = Ab0919 CDR L3
ALWYSNLWV

SEQ ID NO: 2394 - protein, 482 aa, synthetic construct
  REGION 1..482: note = Ab0920 HC
EVQLVESGGGLVQPGGSLRLSCAASGFTFNTYAMNWVRQAPGKGLEWVARIRSKYNNYATYYADSVKGRFTISRDDSKSILYLQMNSLRAEDTAVYYCVRHGNFGNSYVAWFAYWGQGTLVTVSSGGGGSGGGGSGGGGSDIQVTQSPSSLSASVGDRVTITCRSSTGAVTTSNYANWVQQKPGKAFKGLIGGTNKRAPGVPSRFSGSLSGDDATLTISSLQPEDFATYYCALWYSNLWVFGQGTKLEIKGGGGSDKTHTCPPCPAPEAAGGPSVFLFPPKPKDTLMISRTPEVTCVVVDVSHEDPEVKFNWYVDGVEVHNAKTKPREEQYNSTYRVVSVLTVLHQDWLNGKEYKCKVSNKALGAPIEKTISKAKGQPREPQVYTLPPSRDELTKNQVSLTCLVKGFYPSDIAVEWESNGQPENNYKTTPPVLDSDGSFFLYSKLTVDKSRWQQGNVFSCSVMHEALHNHYTQKSLSLSPGK

SEQ ID NO: 2395 - protein, 5 aa, synthetic construct
  REGION 1..5: note = Ab0920 CDR H1
TYAMN

SEQ ID NO: 2396 - protein, 19 aa, synthetic construct
  REGION 1..19: note = Ab0920 CDR H2
RIRSKYNNYATYYADSVKG

SEQ ID NO: 2397 - protein, 14 aa, synthetic construct
  REGION 1..14: note = Ab0920 CDR H3
HGNFGNSYVAWFAY

SEQ ID NO: 2398 - protein, 14 aa, synthetic construct
  REGION 1..14: note = Ab0920 CDR L1
RSSTGAVTTSNYAN

SEQ ID NO: 2399 - protein, 7 aa, synthetic construct
  REGION 1..7: note = Ab0920 CDR L2
GTNKRAP

SEQ ID NO: 2400 - protein, 9 aa, synthetic construct
  REGION 1..9: note = Ab0920 CDR L3
ALWYSNLWV

SEQ ID NO: 2401 - protein, 482 aa, synthetic construct
  REGION 1..482: note = Ab0921 HC
EVQLVESGGGLVQPGGSLRLSCAASGFTFNTYAMNWVRQAPGKGLEWVARIRSKYNNYATYYADSVKGRFTISRDDSKSILYLQMNSLRAEDTAVYYCVRHGNFGNSYVSYFAYWGQGTLVTVSSGGGGSGGGGSGGGGSDIQVTQSPSSLSASVGDRVTITCRSSTGAVTTSNYANWVQQKPGKAFKGLIGGTNKRAPGVPSRFSGSLSGDDATLTISSLQPEDFATYYCALWYSNLWVFGQGTKLEIKGGGGSDKTHTCPPCPAPEAAGGPSVFLFPPKPKDTLMISRTPEVTCVVVDVSHEDPEVKFNWYVDGVEVHNAKTKPREEQYNSTYRVVSVLTVLHQDWLNGKEYKCKVSNKALGAPIEKTISKAKGQPREPQVYTLPPSRDELTKNQVSLTCLVKGFYPSDIAVEWESNGQPENNYKTTPPVLDSDGSFFLYSKLTVDKSRWQQGNVFSCSVMHEALHNHYTQKSLSLSPGK

SEQ ID NO: 2402 - protein, 5 aa, synthetic construct
  REGION 1..5: note = Ab0921 CDR H1
TYAMN

SEQ ID NO: 2403 - protein, 19 aa, synthetic construct
  REGION 1..19: note = Ab0921 CDR H2
RIRSKYNNYATYYADSVKG

SEQ ID NO: 2404 - protein, 14 aa, synthetic construct
  REGION 1..14: note = Ab0921 CDR H3
HGNFGNSYVSYFAY

SEQ ID NO: 2405 - protein, 14 aa, synthetic construct
  REGION 1..14: note = Ab0921 CDR L1
RSSTGAVTTSNYAN

SEQ ID NO: 2406 - protein, 7 aa, synthetic construct
  REGION 1..7: note = Ab0921 CDR L2
GTNKRAP

SEQ ID NO: 2407 - protein, 9 aa, synthetic construct
  REGION 1..9: note = Ab0921 CDR L3
ALWYSNLWV

SEQ ID NO: 2408 - protein, 482 aa, synthetic construct
  REGION 1..482: note = Ab0922 HC
EVQLVESGGGLVQPGGSLRLSCAASGFTFNTYAMNWVRQAPGKGLEWVARIRSKYNNYATYYADSVKGRFTISRDDSKSILYLQMNSLRAEDTAVYYCVRHGNFGNSYVSWFAYWGQGTLVTVSSGGGGSGGGGSGGGGSDIQVTQSPSSLSASVGDRVTITCRSSTGAVTASNYANWVQQKPGKAFKGLIGGTNKRAPGVPSRFSGSLSGDDATLTISSLQPEDFATYYCALWYSNLWVFGQGTKLEIKGGGGSDKTHTCPPCPAPEAAGGPSVFLFPPKPKDTLMISRTPEVTCVVVDVSHEDPEVKFNWYVDGVEVHNAKTKPREEQYNSTYRVVSVLTVLHQDWLNGKEYKCKVSNKALGAPIEKTISKAKGQPREPQVYTLPPSRDELTKNQVSLTCLVKGFYPSDIAVEWESNGQPENNYKTTPPVLDSDGSFFLYSKLTVDKSRWQQGNVFSCSVMHEALHNHYTQKSLSLSPGK

SEQ ID NO: 2409 - protein, 5 aa, synthetic construct
  REGION 1..5: note = Ab0922 CDR H1
TYAMN

SEQ ID NO: 2410 - protein, 19 aa, synthetic construct
  REGION 1..19: note = Ab0922 CDR H2
RIRSKYNNYATYYADSVKG

SEQ ID NO: 2411 - protein, 14 aa, synthetic construct
  REGION 1..14: note = Ab0922 CDR H3
HGNFGNSYVSWFAY

SEQ ID NO: 2412 - protein, 14 aa, synthetic construct
  REGION 1..14: note = Ab0922 CDR L1
RSSTGAVTASNYAN

SEQ ID NO: 2413 - protein, 7 aa, synthetic construct
  REGION 1..7: note = Ab0922 CDR L2
GTNKRAP

SEQ ID NO: 2414 - protein, 9 aa, synthetic construct
  REGION 1..9: note = Ab0922 CDR L3
ALWYSNLWV

SEQ ID NO: 2415 - protein, 482 aa, synthetic construct
  REGION 1..482: note = Ab0923 HC
EVQLVESGGGLVQPGGSLRLSCAASGFTFNTYAMNWVRQAPGKGLEWVARIRSKYNNYATYYADSVKGRFTISRDDSKSILYLQMNSLRAEDTAVYYCVRHGNFGNSYVSWFAYWGQGTLVTVSSGGGGSGGGGSGGGGSDIQVTQSPSSLSASVGDRVTITCRSSTGAVTTANYANWVQQKPGKAFKGLIGGTNKRAPGVPSRFSGSLSGDDATLTISSLQPEDFATYYCALWYSNLWVFGQGTKLEIKGGGGSDKTHTCPPCPAPEAAGGPSVFLFPPKPKDTLMISRTPEVTCVVVDVSHEDPEVKFNWYVDGVEVHNAKTKPREEQYNSTYRVVSVLTVLHQDWLNGKEYKCKVSNKALGAPIEKTISKAKGQPREPQVYTLPPSRDELTKNQVSLTCLVKGFYPSDIAVEWESNGQPENNYKTTPPVLDSDGSFFLYSKLTVDKSRWQQGNVFSCSVMHEALHNHYTQKSLSLSPGK

SEQ ID NO: 2416 - protein, 5 aa, synthetic construct
  REGION 1..5: note = Ab0923 CDR H1
TYAMN

SEQ ID NO: 2417 - protein, 19 aa, synthetic construct
  REGION 1..19: note = Ab0923 CDR H2
RIRSKYNNYATYYADSVKG

SEQ ID NO: 2418 - protein, 14 aa, synthetic construct
  REGION 1..14: note = Ab0923 CDR H3
HGNFGNSYVSWFAY

SEQ ID NO: 2419 - protein, 14 aa, synthetic construct
  REGION 1..14: note = Ab0923 CDR L1
RSSTGAVTTANYAN

SEQ ID NO: 2420 - protein, 7 aa, synthetic construct
  REGION 1..7: note = Ab0923 CDR L2
GTNKRAP

SEQ ID NO: 2421 - protein, 9 aa, synthetic construct
  REGION 1..9: note = Ab0923 CDR L3
ALWYSNLWV

SEQ ID NO: 2422 - protein, 482 aa, synthetic construct
  REGION 1..482: note = Ab0924 HC
EVQLVESGGGLVQPGGSLRLSCAASGFTFNTYAMNWVRQAPGKGLEWVARIRSKYNNYATYYADSVKGRFTISRDDSKSILYLQMNSLRAEDTAVYYCVRHGNFGNSYVSWFAYWGQGTLVTVSSGGGGSGGGGSGGGGSDIQVTQSPSSLSASVGDRVTITCRSSTGAVTTSNAANWVQQKPGKAFKGLIGGTNKRAPGVPSRFSGSLSGDDATLTISSLQPEDFATYYCALWYSNLWVFGQGTKLEIKGGGGSDKTHTCPPCPAPEAAGGPSVFLFPPKPKDTLMISRTPEVTCVVVDVSHEDPEVKFNWYVDGVEVHNAKTKPREEQYNSTYRVVSVLTVLHQDWLNGKEYKCKVSNKALGAPIEKTISKAKGQPREPQVYTLPPSRDELTKNQVSLTCLVKGFYPSDIAVEWESNGQPENNYKTTPPVLDSDGSFFLYSKLTVDKSRWQQGNVFSCSVMHEALHNHYTQKSLSLSPGK

SEQ ID NO: 2423 - protein, 5 aa, synthetic construct
  REGION 1..5: note = Ab0924 CDR H1
TYAMN

SEQ ID NO: 2424 - protein, 19 aa, synthetic construct
  REGION 1..19: note = Ab0924 CDR H2
RIRSKYNNYATYYADSVKG

SEQ ID NO: 2425 - protein, 14 aa, synthetic construct
  REGION 1..14: note = Ab0924 CDR H3
HGNFGNSYVSWFAY

SEQ ID NO: 2426 - protein, 14 aa, synthetic construct
  REGION 1..14: note = Ab0924 CDR L1
RSSTGAVTTSNAAN

SEQ ID NO: 2427 - protein, 7 aa, synthetic construct
  REGION 1..7: note = Ab0924 CDR L2
GTNKRAP

SEQ ID NO: 2428 - protein, 9 aa, synthetic construct
  REGION 1..9: note = Ab0924 CDR L3
ALWYSNLWV

SEQ ID NO: 2429 - protein, 482 aa, synthetic construct
  REGION 1..482: note = Ab0925 HC
EVQLVESGGGLVQPGGSLRLSCAASGFTFNTYAMNWVRQAPGKGLEWVARIRSKYNNYATYYADSVKGRFTISRDDSKSILYLQMNSLRAEDTAVYYCVRHGNFGNSYVSWFAYWGQGTLVTVSSGGGGSGGGGSGGGGSDIQVTQSPSSLSASVGDRVTITCRSSTGAVTTSNYANWVQQKPGKAFKGLIGGTSKRAPGVPSRFSGSLSGDDATLTISSLQPEDFATYYCALWYSNLWVFGQGTKLEIKGGGGSDKTHTCPPCPAPEAAGGPSVFLFPPKPKDTLMISRTPEVTCVVVDVSHEDPEVKFNWYVDGVEVHNAKTKPREEQYNSTYRVVSVLTVLHQDWLNGKEYKCKVSNKALGAPIEKTISKAKGQPREPQVYTLPPSRDELTKNQVSLTCLVKGFYPSDIAVEWESNGQPENNYKTTPPVLDSDGSFFLYSKLTVDKSRWQQGNVFSCSVMHEALHNHYTQKSLSLSPGK

SEQ ID NO: 2430 - protein, 5 aa, synthetic construct
  REGION 1..5: note = Ab0925 CDR H1
TYAMN

SEQ ID NO: 2431 - protein, 19 aa, synthetic construct
  REGION 1..19: note = Ab0925 CDR H2
RIRSKYNNYATYYADSVKG

SEQ ID NO: 2432 - protein, 14 aa, synthetic construct
  REGION 1..14: note = Ab0925 CDR H3
HGNFGNSYVSWFAY

SEQ ID NO: 2433 - protein, 14 aa, synthetic construct
  REGION 1..14: note = Ab0925 CDR L1
RSSTGAVTTSNYAN

SEQ ID NO: 2434 - protein, 7 aa, synthetic construct
  REGION 1..7: note = Ab0925 CDR L2
GTSKRAP

SEQ ID NO: 2435 - protein, 9 aa, synthetic construct
  REGION 1..9: note = Ab0925 CDR L3
ALWYSNLWV

SEQ ID NO: 2436 - protein, 482 aa, synthetic construct
  REGION 1..482: note = Ab0926 HC
EVQLVESGGGLVQPGGSLRLSCAASGFTFNTYAMNWVRQAPGKGLEWVARIRSKYNNYATYYADSVKGRFTISRDDSKSILYLQMNSLRAEDTAVYYCVRHGNFGNSYVSWFAYWGQGTLVTVSSGGGGSGGGGSGGGGSDIQVTQSPSSLSASVGDRVTITCRSSTGAVTTSNYANWVQQKPGKAFKGLIGGTNSRAPGVPSRFSGSLSGDDATLTISSLQPEDFATYYCALWYSNLWVFGQGTKLEIKGGGGSDKTHTCPPCPAPEAAGGPSVFLFPPKPKDTLMISRTPEVTCVVVDVSHEDPEVKFNWYVDGVEVHNAKTKPREEQYNSTYRVVSVLTVLHQDWLNGKEYKCKVSNKALGAPIEKTISKAKGQPREPQVYTLPPSRDELTKNQVSLTCLVKGFYPSDIAVEWESNGQPENNYKTTPPVLDSDGSFFLYSKLTVDKSRWQQGNVFSCSVMHEALHNHYTQKSLSLSPGK

SEQ ID NO: 2437 - protein, 5 aa, synthetic construct
  REGION 1..5: note = Ab0926 CDR H1
TYAMN

SEQ ID NO: 2438 - protein, 19 aa, synthetic construct
  REGION 1..19: note = Ab0926 CDR H2
RIRSKYNNYATYYADSVKG

SEQ ID NO: 2439 - protein, 14 aa, synthetic construct
  REGION 1..14: note = Ab0926 CDR H3
HGNFGNSYVSWFAY

SEQ ID NO: 2440 - protein, 14 aa, synthetic construct
  REGION 1..14: note = Ab0926 CDR L1
RSSTGAVTTSNYAN

SEQ ID NO: 2441 - protein, 7 aa, synthetic construct
  REGION 1..7: note = Ab0926 CDR L2
GTNSRAP

SEQ ID NO: 2442 - protein, 9 aa, synthetic construct
  REGION 1..9: note = Ab0926 CDR L3
ALWYSNLWV

SEQ ID NO: 2443 - protein, 482 aa, synthetic construct
  REGION 1..482: note = Ab0927 HC
EVQLVESGGGLVQPGGSLRLSCAASGFTFNTYAMNWVRQAPGKGLEWVARIRSKYNNYATYYADSVKGRFTISRDDSKSILYLQMNSLRAEDTAVYYCVRHGNFGNSYVSWFAYWGQGTLVTVSSGGGGSGGGGSGGGGSDIQVTQSPSSLSASVGDRVTITCRSSTGAVTTSNYANWVQQKPGKAFKGLIGGTNKRAPGVPSRFSGSLSGDDATLTISSLQPEDFATYYCALYYSNLWVFGQGTKLEIKGGGGSDKTHTCPPCPAPEAAGGPSVFLFPPKPKDTLMISRTPEVTCVVVDVSHEDPEVKFNWYVDGVEVHNAKTKPREEQYNSTYRVVSVLTVLHQDWLNGKEYKCKVSNKALGAPIEKTISKAKGQPREPQVYTLPPSRDELTKNQVSLTCLVKGFYPSDIAVEWESNGQPENNYKTTPPVLDSDGSFFLYSKLTVDKSRWQQGNVFSCSVMHEALHNHYTQKSLSLSPGK

SEQ ID NO: 2444 - protein, 5 aa, synthetic construct
  REGION 1..5: note = Ab0927 CDR H1
TYAMN

SEQ ID NO: 2445 - protein, 19 aa, synthetic construct
  REGION 1..19: note = Ab0927 CDR H2
RIRSKYNNYATYYADSVKG

SEQ ID NO: 2446 - protein, 14 aa, synthetic construct
  REGION 1..14: note = Ab0927 CDR H3
HGNFGNSYVSWFAY

SEQ ID NO: 2447 - protein, 14 aa, synthetic construct
  REGION 1..14: note = Ab0927 CDR L1
RSSTGAVTTSNYAN

SEQ ID NO: 2448 - protein, 7 aa, synthetic construct
  REGION 1..7: note = Ab0927 CDR L2
GTNKRAP

SEQ ID NO: 2449 - protein, 9 aa, synthetic construct
  REGION 1..9: note = Ab0927 CDR L3
ALYYSNLWV

SEQ ID NO: 2450 - protein, 482 aa, synthetic construct
  REGION 1..482: note = Ab0928 HC
EVQLVESGGGLVQPGGSLRLSCAASGFTFNTYAMNWVRQAPGKGLEWVARIRSKYNNYATYYADSVKGRFTISRDDSKSILYLQMNSLRAEDTAVYYCVRHGNFGNSYVSWFAYWGQGTLVTVSSGGGGSGGGGSGGGGSDIQVTQSPSSLSASVGDRVTITCRSSTGAVTTSNYANWVQQKPGKAFKGLIGGTNKRAPGVPSRFSGSLSGDDATLTISSLQPEDFATYYCALWYANLWVFGQGTKLEIKGGGGSDKTHTCPPCPAPEAAGGPSVFLFPPKPKDTLMISRTPEVTCVVVDVSHEDPEVKFNWYVDGVEVHNAKTKPREEQYNSTYRVVSVLTVLHQDWLNGKEYKCKVSNKALGAPIEKTISKAKGQPREPQVYTLPPSRDELTKNQVSLTCLVKGFYPSDIAVEWESNGQPENNYKTTPPVLDSDGSFFLYSKLTVDKSRWQQGNVFSCSVMHEALHNHYTQKSLSLSPGK

SEQ ID NO: 2451 - protein, 5 aa, synthetic construct
  REGION 1..5: note = Ab0928 CDR H1
TYAMN

SEQ ID NO: 2452 - protein, 19 aa, synthetic construct
  REGION 1..19: note = Ab0928 CDR H2
RIRSKYNNYATYYADSVKG

SEQ ID NO: 2453 - protein, 14 aa, synthetic construct
  REGION 1..14: note = Ab0928 CDR H3
HGNFGNSYVSWFAY

SEQ ID NO: 2454 - protein, 14 aa, synthetic construct
  REGION 1..14: note = Ab0928 CDR L1
RSSTGAVTTSNYAN

SEQ ID NO: 2455 - protein, 7 aa, synthetic construct
  REGION 1..7: note = Ab0928 CDR L2
GTNKRAP

SEQ ID NO: 2456 - protein, 9 aa, synthetic construct
  REGION 1..9: note = Ab0928 CDR L3
ALWYANLWV

SEQ ID NO: 2457 - protein, 482 aa, synthetic construct
  REGION 1..482: note = Ab0929 HC
EVQLVESGGGLVQPGGSLRLSCAASGFTFNTYAMNWVRQAPGKGLEWVARIRSKYNNYATYYADSVKGRFTISRDDSKSILYLQMNSLRAEDTAVYYCVRHGNFGNSYVSWFAYWGQGTLVTVSSGGGGSGGGGSGGGGSDIQVTQSPSSLSASVGDRVTITCRSSTGAVTTSNYANWVQQKPGKAFKGLIGGTNKRAPGVPSRFSGSLSGDDATLTISSLQPEDFATYYCALWYSALWVFGQGTKLEIKGGGGSDKTHTCPPCPAPEAAGGPSVFLFPPKPKDTLMISRTPEVTCVVVDVSHEDPEVKFNWYVDGVEVHNAKTKPREEQYNSTYRVVSVLTVLHQDWLNGKEYKCKVSNKALGAPIEKTISKAKGQPREPQVYTLPPSRDELTKNQVSLTCLVKGFYPSDIAVEWESNGQPENNYKTTPPVLDSDGSFFLYSKLTVDKSRWQQGNVFSCSVMHEALHNHYTQKSLSLSPGK

SEQ ID NO: 2458 - protein, 5 aa, synthetic construct
  REGION 1..5: note = Ab0929 CDR H1
TYAMN

SEQ ID NO: 2459 - protein, 19 aa, synthetic construct
  REGION 1..19: note = Ab0929 CDR H2
RIRSKYNNYATYYADSVKG

SEQ ID NO: 2460 - protein, 14 aa, synthetic construct
  REGION 1..14: note = Ab0929 CDR H3
HGNFGNSYVSWFAY

SEQ ID NO: 2461 - protein, 14 aa, synthetic construct
  REGION 1..14: note = Ab0929 CDR L1
RSSTGAVTTSNYAN

SEQ ID NO: 2462 - protein, 7 aa, synthetic construct
  REGION 1..7: note = Ab0929 CDR L2
GTNKRAP

SEQ ID NO: 2463 - protein, 9 aa, synthetic construct
  REGION 1..9: note = Ab0929 CDR L3
ALWYSALWV

SEQ ID NO: 2464 - protein, 482 aa, synthetic construct
  REGION 1..482: note = Ab0930 HC
EVQLVESGGGLVQPGGSLRLSCAASGFTFNTYAMNWVRQAPGKGLEWVARIRSKYNNYATYYADSVKGRFTISRDDSKSILYLQMNSLRAEDTAVYYCVRHGNFGNSYVSWFAYWGQGTLVTVSSGGGGSGGGGSGGGGSDIQVTQSPSSLSASVGDRVTITCRSSTGAVTTSNYANWVQQKPGKAFKGLIGGTNKRAPGVPSRFSGSLSGDDATLTISSLQPEDFATYYCALWYSNLYVFGQGTKLEIKGGGGSDKTHTCPPCPAPEAAGGPSVFLFPPKPKDTLMISRTPEVTCVVVDVSHEDPEVKFNWYVDGVEVHNAKTKPREEQYNSTYRVVSVLTVLHQDWLNGKEYKCKVSNKALGAPIEKTISKAKGQPREPQVYTLPPSRDELTKNQVSLTCLVKGFYPSDIAVEWESNGQPENNYKTTPPVLDSDGSFFLYSKLTVDKSRWQQGNVFSCSVMHEALHNHYTQKSLSLSPGK

SEQ ID NO: 2465 - protein, 5 aa, synthetic construct
  REGION 1..5: note = Ab0930 CDR H1
TYAMN

SEQ ID NO: 2466 - protein, 19 aa, synthetic construct
  REGION 1..19: note = Ab0930 CDR H2
RIRSKYNNYATYYADSVKG

SEQ ID NO: 2467 - protein, 14 aa, synthetic construct
  REGION 1..14: note = Ab0930 CDR H3
HGNFGNSYVSWFAY

SEQ ID NO: 2468 - protein, 14 aa, synthetic construct
  REGION 1..14: note = Ab0930 CDR L1
RSSTGAVTTSNYAN

SEQ ID NO: 2469 - protein, 7 aa, synthetic construct
  REGION 1..7: note = Ab0930 CDR L2
GTNKRAP

SEQ ID NO: 2470 - protein, 9 aa, synthetic construct
  REGION 1..9: note = Ab0930 CDR L3
ALWYSNLYV

SEQ ID NO: 2471 - protein, 214 aa, synthetic construct; identical to SEQ ID NO: 857
  REGION 1..214: note = Ab1091 Hole LC

SEQ ID NO: 2472 - protein, 698 aa, synthetic construct
  REGION 1..698: note = Ab1091 Hole HC
EVQLVESGGGLVQPGGSLRLSCAASGFDFSSYSIHWVRQAPGKGLEWVAAISPYYGSTYYADSVKGRFTISADTSKNTAYLQMNSLRAEDTAVYYCARYYEYYKYDLYAGSLGFDYWGQGTLVTVSSASTKGPSVFPLAPSSKSTSGGTAALGCLVKDYFPEPVTVSWNSGALTSGVHTFPAVLQSSGLYSLSSVVTVPSSSLGTQTYICNVNHKPSNTKVDKKVEPKSCDKTHTGGGGSGGEVQLVESGGGLVQPGGSLRLSCAASGFDFSSYSIHWVRQAPGKGLEWVAAISPYYGSTYYADSVKGRFTISADTSKNTAYLQMNSLRAEDTAVYYCARYYEYYKYDLYAGSLGFDYWGQGTLVTVSSASTKGPSVFPLAPSSKSTSGGTAALGCLVKDYFPEPVTVSWNSGALTSGVHTFPAVLQSSGLYSLSSVVTVPSSSLGTQTYICNVNHKPSNTKVDKKVEPKSCDKTHTCPPCPAPEAAGGPSVFLFPPKPKDTLMISRTPEVTCVVVDVSHEDPEVKFNWYVDGVEVHNAKTKPREEQYNSTYRVVSVLTVLHQDWLNGKEYKCKVSNKALPAPIEKTISKAKGQPREPQVYTLPPSRDELTKNQVSLSCAVKGFYPSDIAVEWESNGQPENNYKTTPPVLDSDGSFFLVSKLTVDKSRWQQGNVFSCSVMHEALHNHYTQKSLSLSPG

SEQ ID NO: 2473 - protein, 481 aa, synthetic construct
  REGION 1..481: note = Ab1091 Knob Hc
EVQLVESGGGLVQPGGSLRLSCAASGFTFNTYAMNWVRQAPGKGLEWVARIRSKYNNYATYYADSVKGRFTISRDDSKSILYLQMNSLRAEDTAVYYCVRHGNFGNSYVSWFAYWGQGTLVTVSSGGGGSGGGGSGGGGSDIQVTQSPSSLSASVGDRVTITCRSSTGAVTTSNYANWVQQKPGKAFKGLIGGTNKLAPGVPSRFSGSLSGDDATLTISSLQPEDFATYYCALWYSNLWVFGQGTKLEIKGGGGSDKTHTCPPCPAPEAAGGPSVFLFPPKPKDTLMISRTPEVTCVVVDVSHEDPEVKFNWYVDGVEVHNAKTKPREEQYNSTYRVVSVLTVLHQDWLNGKEYKCKVSNKALPAPIEKTISKAKGQPREPQVYTLPPSRDELTKNQVSLWCLVKGFYPSDIAVEWESNGQPENNYKTTPPVLDSDGSFFLYSKLTVDKSRWQQGNVFSCSVMHEALHNHYTQKSLSLSPG

SEQ ID NO: 2474 - protein, 5 aa, synthetic construct
  REGION 1..5: note = Ab1091 CDR H1
TYAMN

SEQ ID NO: 2475 - protein, 19 aa, synthetic construct
  REGION 1..19: note = Ab1091 CDR H2
RIRSKYNNYATYYADSVKG

SEQ ID NO: 2476 - protein, 14 aa, synthetic construct
  REGION 1..14: note = Ab1091 CDR H3
HGNFGNSYVSWFAY

SEQ ID NO: 2477 - protein, 14 aa, synthetic construct
  REGION 1..14: note = Ab1091 CDR L1
RSSTGAVTTSNYAN

SEQ ID NO: 2478 - protein, 7 aa, synthetic construct
  REGION 1..7: note = Ab1091 CDR L2
GTNKLAP

SEQ ID NO: 2479 - protein, 9 aa, synthetic construct
  REGION 1..9: note = Ab1091 CDR L3
ALWYSNLWV

SEQ ID NO: 2480 - protein, 214 aa, synthetic construct; identical to SEQ ID NO: 857
  REGION 1..214: note = Ab1133 Hole LC

SEQ ID NO: 2481 - protein, 698 aa, synthetic construct; identical to SEQ ID NO: 2472
  REGION 1..698: note = Ab1133 Hole HC

SEQ ID NO: 2482 - protein, 481 aa, synthetic construct
  REGION 1..481: note = Ab1133 Knob HC
EVQLVESGGGLVQPGGSLRLSCAASGFTFNTYAMNWVRQAPGKGLEWVARIRSKYNAYATYYADSVKGRFTISRDDSKSILYLQMNSLRAEDTAVYYCVRHGNFGNSYVSWFAYWGQGTLVTVSSGGGGSGGGGSGGGGSDIQVTQSPSSLSASVGDRVTITCRSSTGAVTTSNYANWVQQKPGKAFKGLIGGTNKLAPGVPSRFSGSLSGDDATLTISSLQPEDFATYYCALWYSNLWVFGQGTKLEIKGGGGSDKTHTCPPCPAPEAAGGPSVFLFPPKPKDTLMISRTPEVTCVVVDVSHEDPEVKFNWYVDGVEVHNAKTKPREEQYNSTYRVVSVLTVLHQDWLNGKEYKCKVSNKALPAPIEKTISKAKGQPREPQVYTLPPSRDELTKNQVSLWCLVKGFYPSDIAVEWESNGQPENNYKTTPPVLDSDGSFFLYSKLTVDKSRWQQGNVFSCSVMHEALHNHYTQKSLSLSPG

SEQ ID NO: 2483 - protein, 5 aa, synthetic construct
  REGION 1..5: note = Ab1133 CDR H1
TYAMN

SEQ ID NO: 2484 - protein, 19 aa, synthetic construct
  REGION 1..19: note = Ab1133 CDR H2
RIRSKYNAYATYYADSVKG

SEQ ID NO: 2485 - protein, 14 aa, synthetic construct
  REGION 1..14: note = Ab1133 CDR H3
HGNFGNSYVSWFAY

SEQ ID NO: 2486 - protein, 14 aa, synthetic construct
  REGION 1..14: note = Ab1133 CDR L1
RSSTGAVTTSNYAN

SEQ ID NO: 2487 - protein, 7 aa, synthetic construct
  REGION 1..7: note = Ab1133 CDR L2
GTNKLAP

SEQ ID NO: 2488 - protein, 9 aa, synthetic construct
  REGION 1..9: note = Ab1133 CDR L3
ALWYSNLWV

SEQ ID NO: 2489 - protein, 214 aa, synthetic construct; identical to SEQ ID NO: 857
  REGION 1..214: note = Ab1134 Hole LC

SEQ ID NO: 2490 - protein, 698 aa, synthetic construct; identical to SEQ ID NO: 2472
  REGION 1..698: note = Ab1134 Hole HC

SEQ ID NO: 2491 - protein, 481 aa, synthetic construct
  REGION 1..481: note = Ab1134 Knob HC
EVQLVESGGGLVQPGGSLRLSCAASGFTFSTYAMNWVRQAPGKGLEWVARIRSKYNNYATYYADSVKGRFTISRDDSKSILYLQMNSLRAEDTAVYYCVRHGNFGNSYVSWFAYWGQGTLVTVSSGGGGSGGGGSGGGGSDIQVTQSPSSLSASVGDRVTITCRSSTGAVTTSNYANWVQQKPGKAFKGLIGGTNKLAPGVPSRFSGSLSGDDATLTISSLQPEDFATYYCALWYSNLWVFGQGTKLEIKGGGGSDKTHTCPPCPAPEAAGGPSVFLFPPKPKDTLMISRTPEVTCVVVDVSHEDPEVKFNWYVDGVEVHNAKTKPREEQYNSTYRVVSVLTVLHQDWLNGKEYKCKVSNKALPAPIEKTISKAKGQPREPQVYTLPPSRDELTKNQVSLWCLVKGFYPSDIAVEWESNGQPENNYKTTPPVLDSDGSFFLYSKLTVDKSRWQQGNVFSCSVMHEALHNHYTQKSLSLSPG

SEQ ID NO: 2492 - protein, 5 aa, synthetic construct
  REGION 1..5: note = Ab1134 CDR H1
TYAMN

SEQ ID NO: 2493 - protein, 19 aa, synthetic construct
  REGION 1..19: note = Ab1134 CDR H2
RIRSKYNNYATYYADSVKG

SEQ ID NO: 2494 - protein, 14 aa, synthetic construct
  REGION 1..14: note = Ab1134 CDR H3
HGNFGNSYVSWFAY

SEQ ID NO: 2495 - protein, 14 aa, synthetic construct
  REGION 1..14: note = Ab1134 CDR L1
RSSTGAVTTSNYAN

SEQ ID NO: 2496 - protein, 7 aa, synthetic construct
  REGION 1..7: note = Ab1134 CDR L2
GTNKLAP

SEQ ID NO: 2497 - protein, 9 aa, synthetic construct
  REGION 1..9: note = Ab1134 CDR L3
ALWYSNLWV

SEQ ID NO: 2498 - protein, 214 aa, synthetic construct; identical to SEQ ID NO: 857
  REGION 1..214: note = Ab1135 Hole LC

SEQ ID NO: 2499 - protein, 698 aa, synthetic construct; identical to SEQ ID NO: 2472
  REGION 1..698: note = Ab1135 Hole HC

SEQ ID NO: 2500 - protein, 481 aa, synthetic construct
  REGION 1..481: note = Ab1135 Knob HC
EVQLVESGGGLVQPGGSLRLSCAASGFTFNTYAMNWVRQAPGKGLEWVARIRSKYSNYATYYADSVKGRFTISRDDSKSILYLQMNSLRAEDTAVYYCVRHGNFGNSYVSWFAYWGQGTLVTVSSGGGGSGGGGSGGGGSDIQVTQSPSSLSASVGDRVTITCRSSTGAVTTSNYANWVQQKPGKAFKGLIGGTNKLAPGVPSRFSGSLSGDDATLTISSLQPEDFATYYCALWYSNLWVFGQGTKLEIKGGGGSDKTHTCPPCPAPEAAGGPSVFLFPPKPKDTLMISRTPEVTCVVVDVSHEDPEVKFNWYVDGVEVHNAKTKPREEQYNSTYRVVSVLTVLHQDWLNGKEYKCKVSNKALPAPIEKTISKAKGQPREPQVYTLPPSRDELTKNQVSLWCLVKGFYPSDIAVEWESNGQPENNYKTTPPVLDSDGSFFLYSKLTVDKSRWQQGNVFSCSVMHEALHNHYTQKSLSLSPG

SEQ ID NO: 2501 - protein, 5 aa, synthetic construct
  REGION 1..5: note = Ab1135 CDR H1
TYAMN

SEQ ID NO: 2502 - protein, 19 aa, synthetic construct
  REGION 1..19: note = Ab1135 CDR H2
RIRSKYSNYATYYADSVKG

SEQ ID NO: 2503 - protein, 14 aa, synthetic construct
  REGION 1..14: note = Ab1135 CDR H3
HGNFGNSYVSWFAY

SEQ ID NO: 2504 - protein, 14 aa, synthetic construct
  REGION 1..14: note = Ab1135 CDR L1
RSSTGAVTTSNYAN

SEQ ID NO: 2505 - protein, 7 aa, synthetic construct
  REGION 1..7: note = Ab1135 CDR L2
GTNKLAP

SEQ ID NO: 2506 - protein, 9 aa, synthetic construct
  REGION 1..9: note = Ab1135 CDR L3
ALWYSNLWV

SEQ ID NO: 2507 - protein, 214 aa, synthetic construct; identical to SEQ ID NO: 857
  REGION 1..214: note = Ab1136 Hole LC

SEQ ID NO: 2508 - protein, 698 aa, synthetic construct; identical to SEQ ID NO: 2472
  REGION 1..698: note = Ab1136 Hole HC

SEQ ID NO: 2509 - protein, 481 aa, synthetic construct
  REGION 1..481: note = Ab1136 Knob HC
EVQLVESGGGLVQPGGSLRLSCAASGFTFNTYAMNWVRQAPGKGLEWVARIRSKYQNYATYYADSVKGRFTISRDDSKSILYLQMNSLRAEDTAVYYCVRHGNFGNSYVSWFAYWGQGTLVTVSSGGGGSGGGGSGGGGSDIQVTQSPSSLSASVGDRVTITCRSSTGAVTTSNYANWVQQKPGKAFKGLIGGTNKLAPGVPSRFSGSLSGDDATLTISSLQPEDFATYYCALWYSNLWVFGQGTKLEIKGGGGSDKTHTCPPCPAPEAAGGPSVFLFPPKPKDTLMISRTPEVTCVVVDVSHEDPEVKFNWYVDGVEVHNAKTKPREEQYNSTYRVVSVLTVLHQDWLNGKEYKCKVSNKALPAPIEKTISKAKGQPREPQVYTLPPSRDELTKNQVSLWCLVKGFYPSDIAVEWESNGQPENNYKTTPPVLDSDGSFFLYSKLTVDKSRWQQGNVFSCSVMHEALHNHYTQKSLSLSPG

SEQ ID NO: 2510 - protein, 5 aa, synthetic construct
  REGION 1..5: note = Ab1136 CDR H1
TYAMN

SEQ ID NO: 2511 - protein, 19 aa, synthetic construct
  REGION 1..19: note = Ab1136 CDR H2
RIRSKYQNYATYYADSVKG

SEQ ID NO: 2512 - protein, 14 aa, synthetic construct
  REGION 1..14: note = Ab1136 CDR H3
HGNFGNSYVSWFAY

SEQ ID NO: 2513 - protein, 14 aa, synthetic construct
  REGION 1..14: note = Ab1136 CDR L1
RSSTGAVTTSNYAN

SEQ ID NO: 2514 - protein, 7 aa, synthetic construct
  REGION 1..7: note = Ab1136 CDR L2
GTNKLAP

SEQ ID NO: 2515 - protein, 9 aa, synthetic construct
  REGION 1..9: note = Ab1136 CDR L3
ALWYSNLWV

SEQ ID NO: 2516 - protein, 214 aa, synthetic construct; identical to SEQ ID NO: 857
  REGION 1..214: note = Ab1137 Hole LC

SEQ ID NO: 2517 - protein, 698 aa, synthetic construct; identical to SEQ ID NO: 2472
  REGION 1..698: note = Hole HC

SEQ ID NO: 2518 - protein, 481 aa, synthetic construct
  REGION 1..481: note = Ab1137 Knob HC
EVQLVESGGGLVQPGGSLRLSCAASGFTFNTYAMNWVRQAPGKGLEWVARIRSKYNNYATYYADSVKGRFTISRDDSKSILYLQMNSLRAEDTAVYYCVRHGNFGNAYVSWFAYWGQGTLVTVSSGGGGSGGGGSGGGGSDIQVTQSPSSLSASVGDRVTITCRSSTGAVTTSNYANWVQQKPGKAFKGLIGGTNKLAPGVPSRFSGSLSGDDATLTISSLQPEDFATYYCALWYSNLWVFGQGTKLEIKGGGGSDKTHTCPPCPAPEAAGGPSVFLFPPKPKDTLMISRTPEVTCVVVDVSHEDPEVKFNWYVDGVEVHNAKTKPREEQYNSTYRVVSVLTVLHQDWLNGKEYKCKVSNKALPAPIEKTISKAKGQPREPQVYTLPPSRDELTKNQVSLWCLVKGFYPSDIAVEWESNGQPENNYKTTPPVLDSDGSFFLYSKLTVDKSRWQQGNVFSCSVMHEALHNHYTQKSLSLSPG

SEQ ID NO: 2519 - protein, 5 aa, synthetic construct
  REGION 1..5: note = Ab1137 CDR H1
TYAMN

SEQ ID NO: 2520 - protein, 19 aa, synthetic construct
  REGION 1..19: note = Ab1137 CDR H2
RIRSKYNNYATYYADSVKG

SEQ ID NO: 2521 - protein, 14 aa, synthetic construct
  REGION 1..14: note = Ab1137 CDR H3
HGNFGNAYVSWFAY

SEQ ID NO: 2522 - protein, 14 aa, synthetic construct
  REGION 1..14: note = Ab1137 CDR L1
RSSTGAVTTSNYAN

SEQ ID NO: 2523 - protein, 7 aa, synthetic construct
  REGION 1..7: note = Ab1137 CDR L2
GTNKLAP

SEQ ID NO: 2524 - protein, 9 aa, synthetic construct
  REGION 1..9: note = Ab1137 CDR L3
ALWYSNLWV

SEQ ID NO: 2525 - protein, 291 aa, synthetic construct
  REGION 1..291: note = Ag0052 HC
QDGNEEMGGITQTPYKVSISGTTVILTGGGGSDKTHTCPPCPAPEAAGGPSVFLFPPKPKDTLMISRTPEVTCVVVDVSHEDPEVKFNWYVDGVEVHNAKTKPREEQYNSTYRVVSVLTVLHQDWLNGKEYKCKVSNKALGAPIEKTISKAKGQPREPQVYTLPPSREEMTKNQVSLTCLVKGFYPSDIAVEWESNGQPENNYKTTPPVLDSDGSFFLYSKLTVDKSRWQQGNVFSCSVMHEALHNHYTQKSLSLSPGKGGGGSHHHHHHGGGGSGLNDIFEAQKIEWHEG

SEQ ID NO: 2526 - protein, 291 aa, synthetic construct
  REGION 1..291: note = Ab0053 HC
QDGNEEMGSITQTPYQVSISGTTVILTGGGGSDKTHTCPPCPAPEAAGGPSVFLFPPKPKDTLMISRTPEVTCVVVDVSHEDPEVKFNWYVDGVEVHNAKTKPREEQYNSTYRVVSVLTVLHQDWLNGKEYKCKVSNKALGAPIEKTISKAKGQPREPQVYTLPPSREEMTKNQVSLTCLVKGFYPSDIAVEWESNGQPENNYKTTPPVLDSDGSFFLYSKLTVDKSRWQQGNVFSCSVMHEALHNHYTQKSLSLSPGKGGGGSHHHHHHGGGGSGLNDIFEAQKIEWHEG

SEQ ID NO: 2527 - protein, 283 aa, synthetic construct
  REGION 1..283: note = Ag0060 Hole HC
QDGNEEMGGITQTPYKVSISGTTVILTGGGGSPRGPTIKPCPPCKCPAPNLLGGPSVFIFPPKIKDVLMISLSPIVTCVVVDVSEDDPDVQISWFVNNVEVHTAQTQTHREDYNSTLRVVSALPIQHQDWMSGKEFKCKVNNKDLPAPIERTISKPKGSVRAPQVYVLPPPEEEMTKKQVTLSCAVTDFMPEDIYVEWTNNGKTELNYKNTEPVLDSDGSYFMVSKLRVEKKNWVERNSYSCSVVHEGLHNHHTTKSFSRTPGGGGSGLNDIFEAQKIEWHEG

SEQ ID NO: 2528 - protein, 246 aa, synthetic construct
  REGION 1..246: note = Ag0060 Knob HC
GGGGSPRGPTIKPCPPCKCPAPNLLGGPSVFIFPPKIKDVLMISLSPIVTCVVVDVSEDDPDVQISWFVNNVEVHTAQTQTHREDYNSTLRVVSALPIQHQDWMSGKEFKCKVNNKDLPAPIERTISKPKGSVRAPQVYVLPPPEEEMTKKQVTLWCMVTDFMPEDIYVEWTNNGKTELNYKNTEPVLDSDGSYFMYSKLRVEKKNWVERNSYSCSVVHEGLHNHHTTKSFSRTPGGGGSHHHHHH

SEQ ID NO: 2529 - protein, 238 aa, synthetic construct
  REGION 1..238: note = muCD3(145-2C11) scFv VH-VL
EVQLVESGGGLVQPGKSLKLSCEASGFTFSGYGMHWVRQAPGRGLESVAYITSSSINIKYADAVKGRFTVSRDNAKNLLFLQMNILKSEDTAMYYCARFDWDKNYWGQGTMVTVSSGGGGSGGGGSGGGGSDIQMTQSPSSLPASLGDRVTINCQASQDISNYLNWYQQKPGKAPKLLIYYTNKLADGVPSRFSGSGSGRDSSFTISSLESEDIGSYYCQQYYNYPWTFGPGTKLEIK

SEQ ID NO: 2530 - protein, 244 aa, synthetic construct
  REGION 1..244: note = CD3 (UCHT1.V1) scFv VL-VH
DIQMTQSPSSLSASVGDRVTITCRASQDIRNYLNWYQQKPGKAPKLLIYYTSRLESGVPSRFSGSGSGTDYTLTISSLQPEDFATYYCQQGNTLPWTFGQGTKVEIKGGGGSGGGGSGGGGSEVQLVESGGGLVQPGGSLRLSCAASGYSFTGYTMNWVRQAPGKGLEWVALINPYKGVTTYADSVKGRFTISVDKSKNTAYLQMNSLRAEDTAVYYCARSGYYGDSDWYFDVWGQGTLVTVSS

SEQ ID NO: 2531 - protein, 244 aa, synthetic construct
  REGION 1..244: note = CD3 (UCHT1.V9) scFv VL-VH
DIQMTQSPSSLSASVGDRVTITCRASQDIRNYLNWYQQKPGKAPKLLIYYTSRLESGVPSRFSGSGSGTDYTLTISSLQPEDFATYYCQQGNTLPWTFGQGTKVEIKGGGGSGGGGSGGGGSEVQLVESGGGLVQPGGSLRLSCAASGYSFTGYTMNWVRQAPGKGLEWVALINPYKGVSTYNQKFKDRATLSVDKSKNTAYLQMNSLRAEDTAVYYCARSGYYGDSDWYFDVWGQGTLVTVSS

SEQ ID NO: 2532 - protein, 225 aa, synthetic construct
  REGION 1..225: note = CD3 (UCHT1.V9) Fab_VH_CH1
EVQLVESGGGLVQPGGSLRLSCAASGYSFTGYTMNWVRQAPGKGLEWVALINPYKGVSTYNQKFKDRATLSVDKSKNTAYLQMNSLRAEDTAVYYCARSGYYGDSDWYFDVWGQGTLVTVSSASTKGPSVFPLAPSSKSTSGGTAALGCLVKDYFPEPVTVSWNSGALTSGVHTFPAVLQSSGLYSLSSVVTVPSSSLGTQTYICNVNHKPSNTKVDKKVEPKSC

SEQ ID NO: 2533 - protein, 214 aa, synthetic construct
  REGION 1..214: note = CD3 (UCHT1.V9) Fab_VL_CL
DIQMTQSPSSLSASVGDRVTITCRASQDIRNYLNWYQQKPGKAPKLLIYYTSRLESGVPSRFSGSGSGTDYTLTISSLQPEDFATYYCQQGNTLPWTFGQGTKVEIKRTVAAPSVFIFPPSDSQLKSGTASVVCLLNNFYPREAKVQWKVDNALQSGNSQESVTEQDSKDSTYSLSSTLTLSKADYEKHKVYACEVTHQGLSSPVTKSFNRGEC

SEQ ID NO: 2534 - protein, 242 aa, synthetic construct
  REGION 1..242: note = CD3 (L2K) scFv
DIKLQQSGAELARPGASVKMSCKTSGYTFTRYTMHWVKQRPGQGLEWIGYINPSRGYTNYNQKFKDKATLTTDKSSSTAYMQLSSLTSEDSAVYYCARYYDDHYCLDYWGQGTTLTVSSVEGGSGGSGGSGGSGGVDDIQLTQSPAIMSASPGEKVTMTCRASSSVSYMNWYQQKSGTSPKRWIYDTSKVASGVPYRFSGSGSGTSYSLTISSMEAEDAATYYCQQWSSNPLTFGAGTKLEL

SEQ ID NO: 2535 - protein, 450 aa, synthetic construct
  REGION 1..450: note = CD3 (OKT3) heavy chain
QVQLQQSGAELARPGASVKMSCKASGYTFTRYTMHWVKQRPGQGLEWIGYINPSRGYTNYNQKFKDKATLTTDKSSSTAYMQLSSLTSEDSAVYYCARYYDDHYCLDYWGQGTTLTVSSAKTTAPSVYPLAPVCGGTTGSSVTLGCLVKGYFPEPVTLTWNSGSLSSGVHTFPAVLQSDLYTLSSSVTVTSSTWPSQSITCNVAHPASSTKVDKKIEPRPKSCDKTHTCPPCPAPELLGGPSVFLFPPKPKDTLMISRTPEVTCVVVDVSHEDPEVKFNWYVDGVEVHNAKTKPREEQYNSTYRVVSVLTVLHQDWLNGKEYKCKVSNKALPAPIEKTISKAKGQPREPQVYTLPPSRDELTKNQVSLTCLVKGFYPSDIAVEWESNGQPENNYKTTPPVLDSDGSFFLYSKLTVDKSRWQQGNVFSCSVMHEALHNHYTQKSLSLSPGK

SEQ ID NO: 2536 - protein, 213 aa, synthetic construct
  REGION 1..213: note = CD3 (OKT3) light chain
QIVLTQSPAIMSASPGEKVTMTCSASSSVSYMNWYQQKSGTSPKRWIYDTSKLASGVPAHFRGSGSGTSYSLTISGMEAEDAATYYCQQWSSNPFTFGSGTKLEINRADTAPTVSIFPPSSEQLTSGGASVVCFLNNFYPKDINVKWKIDGSERQNGVLNSWTDQDSKDSTYSMSSTLTLTKDEYERHNSYTCEATHKTSTSPIVKSFNRNEC

SEQ ID NO: 2537 - protein, 449 aa, synthetic construct
  REGION 1..449: note = CD3 (Otelixizumab) heavy chain
EVQLLESGGGLVQPGGSLRLSCAASGFTFSSFPMAWVRQAPGKGLEWVSTISTSGGRTYYRDSVKGRFTISRDNSKNTLYLQMNSLRAEDTAVYYCAKFRQYSGGFDYWGQGTLVTVSSASTKGPSVFPLAPSSKSTSGGTAALGCLVKDYFPEPVTVSWNSGALTSGVHTFPAVLQSSGLYSLSSVVTVPSSSLGTQTYICNVNHKPSNTKVDKKVEPKSCDKTHTCPPCPAPELLGGPSVFLFPPKPKDTLMISRTPEVTCVVVDVSHEDPEVKFNWYVDGVEVHNAKTKPREEQYASTYRVVSVLTVLHQDWLNGKEYKCKVSNKALPAPIEKTISKAKGQPREPQVYTLPPSRDELTKNQVSLTCLVKGFYPSDIAVEWESNGQPENNYKTTPPVLDSDGSFFLYSKLTVDKSRWQQGNVFSCSVMHEALHNHYTQKSLSLSPGK

SEQ ID NO: 2538 - protein, 216 aa, synthetic construct
  REGION 1..216: note = CD3 (Otelixizumab) light chain
DIQLTQPNSVSTSLGSTVKLSCTLSSGNIENNYVHWYQLYEGRSPTTMIYDDDKRPDGVPDRFSGSIDRSSNSAFLTIHNVAIEDEAIYFCHSYVSSFNVFGGGTKLTVLRQPKAAPSVTLFPPSSEELQANKATLVCLISDFYPGAVTVAWKADSSPVKAGVETTTPSKQSNNKYAASSYLSLTPEQWKSHRSYSCQVTHEGSTVEKTVAPTECS

SEQ ID NO: 2539 - protein, 449 aa, synthetic construct
  REGION 1..449: note = CD3 (Teplizumab) heavy chain
QVQLVQSGGGVVQPGRSLRLSCKASGYTFTRYTMHWVRQAPGKGLEWIGYINPSRGYTNYNQKVKDRFTISRDNSKNTAFLQMDSLRPEDTGVYFCARYYDDHYCLDYWGQGTPVTVSSASTKGPSVFPLAPSSKSTSGGTAALGCLVKDYFPEPVTVSWNSGALTSGVHTFPAVLQSSGLYSLSSVVTVPSSSLGTQTYICNVNHKPSNTKVDKKVEPKSCDKTHTCPPCPAPEAAGGPSVFLFPPKPKDTLMISRTPEVTCVVVDVSHEDPEVKFNWYVDGVEVHNAKTKPREEQYNSTYRVVSVLTVLHQDWLNGKEYKCKVSNKALPAPIEKTISKAKGQPREPQVYTLPPSRDELTKNQVSLTCLVKGFYPSDIAVEWESNGQPENNYKTTPPVLDSDGSFFLYSKLTVDKSRWQQGNVFSCSVMHEALHNHYTQKSLSLSPGK

SEQ ID NO: 2540 - protein, 213 aa, synthetic construct
  REGION 1..213: note = CD3 (Teplizumab) light chain
DIQMTQSPSSLSASVGDRVTITCSASSSVSYMNWYQQTPGKAPKRWIYDTSKLASGVPSRFSGSGSGTDYTFTISSLQPEDIATYYCQQWSSNPFTFGQGTKLQITRTVAAPSVFIFPPSDEQLKSGTASVVCLLNNFYPREAKVQWKVDNALQSGNSQESVTEQDSKDSTYSLSSTLTLSKADYEKHKVYACEVTHQGLSSPVTKSFNRGEC

SEQ ID NO: 2541 - protein, 446 aa, synthetic construct
  REGION 1..446: note = CD3 (Visilizumab) heavy chain
QVQLVQSGAEVKKPGASVKVSCKASGYTFISYTMHWVRQAPGQGLEWMGYINPRSGYTHYNQKLKDKATLTADKSASTAYMELSSLRSEDTAVYYCARSAYYDYDGFAYWGQGTLVTVSSASTKGPSVFPLAPCSRSTSESTAALGCLVKDYFPEPVTVSWNSGALTSGVHTFPAVLQSSGLYSLSSVVTVPSSNFGTQTYTCNVDHKPSNTKVDKTVERKCCVECPPCPAPPAAAPSVFLFPPKPKDTLMISRTPEVTCVVVDVSHEDPEVQFNWYVDGVEVHNAKTKPREEQFNSTFRVVSVLTVVHQDWLNGKEYKCKVSNKGLPAPIEKTISKTKGQPREPQVYTLPPSREEMTKNQVSLTCLVKGFYPSDIAVEWESNGQPENNYKTTPPMLDSDGSFFLYSKLTVDKSRWQQGNVFSCSVMHEALHNHYTQKSLSLSPSK

SEQ ID NO: 2542 - protein, 213 aa, synthetic construct
  REGION 1..213: note = CD3 (Visilizumab) light chain
DIQMTQSPSSLSASVGDRVTITCSASSSVSYMNWYQQKPGKAPKRLIYDTSKLASGVPSRFSGSGSGTDFTLTISSLQPEDFATYYCQQWSSNPPTFGGGTKVEIKRTVAAPSVFIFPPSDEQLKSGTASVVCLLNNFYPREAKVQWKVDNALQSGNSQESVTEQDSKDSTYSLSSTLTLSKADYEKHKVYACEVTHQGLSSPVTKSFNRGEC

SEQ ID NO: 2543 - protein, 215 aa, synthetic construct
  REGION 1..215: note = Ab0823 LC
ENVLTQSPAIMAASQGEKVTMTCSASSSVSSGNFHWYQQKPGTSPKLWIYRTSNLASGVPARFSGSGSGTSYSLTISSMEAEDAATYYCQQWSGYPYTFGSGTKLEIKRTVAAPSVFIFPPSDEQLKSGTASVVCLLNNFYPREAKVQWKVDNALQSGNSQESVTEQDSKDSTYSLSSTLTLSKADYEKHKVYACEVTHQGLSSPVTKSFNRGEC

SEQ ID NO: 2544 - protein, 446 aa, synthetic construct
  REGION 1..446: note = Ab0823 HC
EVKLEESGGGLVQPGGSMKLSCVASGFTFSNYWMNWVRQSPEKGLEWVAQIRVKSENFATHYAESVKGRFTISRDDSKSSVYLQMNNLRAEDTGIYYCTLYDGFSWGQGTTLTVSSASTKGPSVFPLAPSSKSTSGGTAALGCLVKDYFPEPVTVSWNSGALTSGVHTFPAVLQSSGLYSLSSVVTVPSSSLGTQTYICNVNHKPSNTKVDKKVEPKSCDKTHTCPPCPAPEAAGGPSVFLFPPKPKDTLMISRTPEVTCVVVDVSHEDPEVKFNWYVDGVEVHNAKTKPREEQYNSTYRVVSVLTVLHQDWLNGKEYKCKVSNKALGAPIEKTISKAKGQPREPQVYTLPPSRDELTKNQVSLTCLVKGFYPSDIAVEWESNGQPENNYKTTPPVLDSDGSFFLYSKLTVDKSRWQQGNVFSCSVMHEALHNHYTQKSLSLSPGK

SEQ ID NO: 2545 - protein, 5 aa, synthetic construct
  REGION 1..5: note = Ab0823 CDR H1
NYWMN

SEQ ID NO: 2546 - protein, 19 aa, synthetic construct
  REGION 1..19: note = Ab0823 CDR H2
QIRVKSENFATHYAESVKG

SEQ ID NO: 2547 - protein, 5 aa, synthetic construct
  REGION 1..5: note = Ab0823 CDR H3
YDGFS

SEQ ID NO: 2548 - protein, 12 aa, synthetic construct
  REGION 1..12: note = Ab0823 CDR L1
SASSSVSSGNFH

SEQ ID NO: 2549 - protein, 7 aa, synthetic construct
  REGION 1..7: note = Ab0823 CDR L2
RTSNLAS

SEQ ID NO: 2550 - protein, 9 aa, synthetic construct
  REGION 1..9: note = Ab0823 CDR L3
QQWSGYPYT

SEQ ID NO: 2551 - protein, 215 aa, synthetic construct
  REGION 1..215: note = Ab0824 LC
DIQMTQSPSSLSASVGDRVTITCSASSSVSSGNFHWYQQKPGKAPKLLIYRTSNLASGVPSRFSGSGSGTDFTLTISSLQPEDFATYYCQQWSGYPYTFGQGTKVEIKRTVAAPSVFIFPPSDEQLKSGTASVVCLLNNFYPREAKVQWKVDNALQSGNSQESVTEQDSKDSTYSLSSTLTLSKADYEKHKVYACEVTHQGLSSPVTKSFNRGEC

SEQ ID NO: 2552 - protein, 446 aa, synthetic construct
  REGION 1..446: note = Ab0824 HC
EVQLVESGGGLVQPGGSLRLSCAASGFTFSNYWMNWVRQAPGKGLEWVAQIRVKSENFATHYADSVKGRFTISRDNSKNTLYLQMNSLRAEDTAVYYCARYDGFSWGQGTLVTVSSASTKGPSVFPLAPSSKSTSGGTAALGCLVKDYFPEPVTVSWNSGALTSGVHTFPAVLQSSGLYSLSSVVTVPSSSLGTQTYICNVNHKPSNTKVDKKVEPKSCDKTHTCPPCPAPEAAGGPSVFLFPPKPKDTLMISRTPEVTCVVVDVSHEDPEVKFNWYVDGVEVHNAKTKPREEQYNSTYRVVSVLTVLHQDWLNGKEYKCKVSNKALGAPIEKTISKAKGQPREPQVYTLPPSRDELTKNQVSLTCLVKGFYPSDIAVEWESNGQPENNYKTTPPVLDSDGSFFLYSKLTVDKSRWQQGNVFSCSVMHEALHNHYTQKSLSLSPGK

SEQ ID NO: 2553 - protein, 5 aa, synthetic construct
  REGION 1..5: note = Ab0824 CDR H1
NYWMN

SEQ ID NO: 2554 - protein, 18 aa, synthetic construct
  REGION 1..18: note = Ab0824 CDR H2
QIRVKSENFATHYADSVK

SEQ ID NO: 2555 - protein, 5 aa, synthetic construct
  REGION 1..5: note = Ab0824 CDR H3
YDGFS

SEQ ID NO: 2556 - protein, 12 aa, synthetic construct
  REGION 1..12: note = Ab0824 CDR L1
SASSSVSSGNFH

SEQ ID NO: 2557 - protein, 7 aa, synthetic construct
  REGION 1..7: note = Ab0824 CDR L2
RTSNLAS

SEQ ID NO: 2558 - protein, 9 aa, synthetic construct
  REGION 1..9: note = Ab0824 CDR L3
QQWSGYPYT

SEQ ID NO: 2559 - protein, 215 aa, synthetic construct; identical to SEQ ID NO: 2551
  REGION 1..215: note = Ab0825 LC

SEQ ID NO: 2560 - protein, 446 aa, synthetic construct
  REGION 1..446: note = Ab0825 HC
EVQLVESGGGLVQPGGSLRLSCAASGFTFSNYWMNWVRQAPGKGLEWVAQIRVKSENFATHYADSVKGRFTISRDNSKNTLYLQMNSLRAEDTAVYYCTLYDGFSWGQGTLVTVSSASTKGPSVFPLAPSSKSTSGGTAALGCLVKDYFPEPVTVSWNSGALTSGVHTFPAVLQSSGLYSLSSVVTVPSSSLGTQTYICNVNHKPSNTKVDKKVEPKSCDKTHTCPPCPAPEAAGGPSVFLFPPKPKDTLMISRTPEVTCVVVDVSHEDPEVKFNWYVDGVEVHNAKTKPREEQYNSTYRVVSVLTVLHQDWLNGKEYKCKVSNKALGAPIEKTISKAKGQPREPQVYTLPPSRDELTKNQVSLTCLVKGFYPSDIAVEWESNGQPENNYKTTPPVLDSDGSFFLYSKLTVDKSRWQQGNVFSCSVMHEALHNHYTQKSLSLSPGK

SEQ ID NO: 2561 - protein, 5 aa, synthetic construct
  REGION 1..5: note = Ab0825 CDR H1
NYWMN

SEQ ID NO: 2562 - protein, 19 aa, synthetic construct
  REGION 1..19: note = Ab0825 HC
QIRVKSENFATHYADSVKG

SEQ ID NO: 2563 - protein, 5 aa, synthetic construct
  REGION 1..5: note = Ab0825 CDR H3
YDGFS

SEQ ID NO: 2564 - protein, 12 aa, synthetic construct
  REGION 1..12: note = Ab0825 CDR L1
SASSSVSSGNFH

SEQ ID NO: 2565 - protein, 7 aa, synthetic construct
  REGION 1..7: note = Ab0825 CDR L2
RTSNLAS

SEQ ID NO: 2566 - protein, 9 aa, synthetic construct
  REGION 1..9: note = Ab0825 CDR L3
QQWSGYPYT

SEQ ID NO: 2567 - protein, 215 aa, synthetic construct; identical to SEQ ID NO: 2551
  REGION 1..215: note = Ab0826 LC

SEQ ID NO: 2568 - protein, 446 aa, synthetic construct
  REGION 1..446: note = Ab0826 HC
EVQLVESGGGLVQPGGSLRLSCAASGFTFSNYWMNWVRQAPGKGLEWVAQIRVKSENFATHYADSVKGRFTISRDDSKSTVYLQMNSLRAEDTAVYYCARYDGFSWGQGTLVTVSSASTKGPSVFPLAPSSKSTSGGTAALGCLVKDYFPEPVTVSWNSGALTSGVHTFPAVLQSSGLYSLSSVVTVPSSSLGTQTYICNVNHKPSNTKVDKKVEPKSCDKTHTCPPCPAPEAAGGPSVFLFPPKPKDTLMISRTPEVTCVVVDVSHEDPEVKFNWYVDGVEVHNAKTKPREEQYNSTYRVVSVLTVLHQDWLNGKEYKCKVSNKALGAPIEKTISKAKGQPREPQVYTLPPSRDELTKNQVSLTCLVKGFYPSDIAVEWESNGQPENNYKTTPPVLDSDGSFFLYSKLTVDKSRWQQGNVFSCSVMHEALHNHYTQKSLSLSPGK

SEQ ID NO: 2569 - protein, 5 aa, synthetic construct
  REGION 1..5: note = Ab0826 CDR H1
NYWMN

SEQ ID NO: 2570 - protein, 19 aa, synthetic construct
  REGION 1..19: note = Ab0826 CDR H2
QIRVKSENFATHYADSVKG

SEQ ID NO: 2571 - protein, 5 aa, synthetic construct
  REGION 1..5: note = Ab0826 CDR H3
YDGFS

SEQ ID NO: 2572 - protein, 12 aa, synthetic construct
  REGION 1..12: note = Ab0826 CDR L1
SASSSVSSGNFH

SEQ ID NO: 2573 - protein, 7 aa, synthetic construct
  REGION 1..7: note = Ab0826 CDR L2
RTSNLAS

SEQ ID NO: 2574 - protein, 9 aa, synthetic construct
  REGION 1..9: note = Ab0826 CDR L3
QQWSGYPYT

SEQ ID NO: 2575 - protein, 215 aa, synthetic construct; identical to SEQ ID NO: 2551
  REGION 1..215: note = Ab0827 LC

SEQ ID NO: 2576 - protein, 446 aa, synthetic construct
  REGION 1..446: note = Ab0827 HC
EVQLVESGGGLVQPGGSLRLSCAASGFTFSNYWMNWVRQAPGKGLEWVAQIRVKSENFATHYADSVKGRFTISRDNSKNTVYLQMNSLRAEDTAVYYCTLYDGFSWGQGTLVTVSSASTKGPSVFPLAPSSKSTSGGTAALGCLVKDYFPEPVTVSWNSGALTSGVHTFPAVLQSSGLYSLSSVVTVPSSSLGTQTYICNVNHKPSNTKVDKKVEPKSCDKTHTCPPCPAPEAAGGPSVFLFPPKPKDTLMISRTPEVTCVVVDVSHEDPEVKFNWYVDGVEVHNAKTKPREEQYNSTYRVVSVLTVLHQDWLNGKEYKCKVSNKALGAPIEKTISKAKGQPREPQVYTLPPSRDELTKNQVSLTCLVKGFYPSDIAVEWESNGQPENNYKTTPPVLDSDGSFFLYSKLTVDKSRWQQGNVFSCSVMHEALHNHYTQKSLSLSPGK

SEQ ID NO: 2577 - protein, 5 aa, synthetic construct
  REGION 1..5: note = Ab0827 CDR H1
NYWMN

SEQ ID NO: 2578 - protein, 19 aa, synthetic construct
  REGION 1..19: note = Ab0827 CDR H2
QIRVKSENFATHYADSVKG

SEQ ID NO: 2579 - protein, 5 aa, synthetic construct
  REGION 1..5: note = Ab0827 CDR H3
YDGFS

SEQ ID NO: 2580 - protein, 12 aa, synthetic construct
  REGION 1..12: note = Ab0827 CDR L1
SASSSVSSGNFH

SEQ ID NO: 2581 - protein, 7 aa, synthetic construct
  REGION 1..7: note = Ab0827 CDR L2
RTSNLAS

SEQ ID NO: 2582 - protein, 9 aa, synthetic construct
  REGION 1..9: note = Ab0827 CDR L3
QQWSGYPYT

SEQ ID NO: 2583 - protein, 215 aa, synthetic construct; identical to SEQ ID NO: 2551
  REGION 1..215: note = Ab0828 LC

SEQ ID NO: 2584 - protein, 446 aa, synthetic construct
  REGION 1..446: note = Ab0828 HC
EVQLVESGGGLVQPGGSLRLSCAASGFTFSNYWMNWVRQAPGKGLEWVAQIRVKSENFATHYADSVKGRFTISRDDSKSTLYLQMNSLRAEDTAVYYCTLYDGFSWGQGTLVTVSSASTKGPSVFPLAPSSKSTSGGTAALGCLVKDYFPEPVTVSWNSGALTSGVHTFPAVLQSSGLYSLSSVVTVPSSSLGTQTYICNVNHKPSNTKVDKKVEPKSCDKTHTCPPCPAPEAAGGPSVFLFPPKPKDTLMISRTPEVTCVVVDVSHEDPEVKFNWYVDGVEVHNAKTKPREEQYNSTYRVVSVLTVLHQDWLNGKEYKCKVSNKALGAPIEKTISKAKGQPREPQVYTLPPSRDELTKNQVSLTCLVKGFYPSDIAVEWESNGQPENNYKTTPPVLDSDGSFFLYSKLTVDKSRWQQGNVFSCSVMHEALHNHYTQKSLSLSPGK

SEQ ID NO: 2585 - protein, 5 aa, synthetic construct
  REGION 1..5: note = Ab0828 CDR H1
NYWMN

SEQ ID NO: 2586 - protein, 19 aa, synthetic construct
  REGION 1..19: note = Ab0828 CDR H2
QIRVKSENFATHYADSVKG

SEQ ID NO: 2587 - protein, 5 aa, synthetic construct
  REGION 1..5: note = Ab0828 CDR H3
YDGFS

SEQ ID NO: 2588 - protein, 12 aa, synthetic construct
  REGION 1..12: note = Ab0828 CDR L1
SASSSVSSGNFH

SEQ ID NO: 2589 - protein, 7 aa, synthetic construct
  REGION 1..7: note = Ab0828 CDR L2
RTSNLAS

SEQ ID NO: 2590 - protein, 9 aa, synthetic construct
  REGION 1..9: note = Ab0828 CDR L3
QQWSGYPYT

SEQ ID NO: 2591 - protein, 215 aa, synthetic construct; identical to SEQ ID NO: 2551
  REGION 1..215: note = Ab0829 LC

SEQ ID NO: 2592 - protein, 446 aa, synthetic construct
  REGION 1..446: note = Ab0829 HC
EVQLVESGGGLVQPGGSLRLSCAASGFTFSNYWMNWVRQAPGKGLEWVAQIRVKSENFATHYADSVKGRFTISRDDSKSTVYLQMNSLRAEDTAVYYCTLYDGFSWGQGTLVTVSSASTKGPSVFPLAPSSKSTSGGTAALGCLVKDYFPEPVTVSWNSGALTSGVHTFPAVLQSSGLYSLSSVVTVPSSSLGTQTYICNVNHKPSNTKVDKKVEPKSCDKTHTCPPCPAPEAAGGPSVFLFPPKPKDTLMISRTPEVTCVVVDVSHEDPEVKFNWYVDGVEVHNAKTKPREEQYNSTYRVVSVLTVLHQDWLNGKEYKCKVSNKALGAPIEKTISKAKGQPREPQVYTLPPSRDELTKNQVSLTCLVKGFYPSDIAVEWESNGQPENNYKTTPPVLDSDGSFFLYSKLTVDKSRWQQGNVFSCSVMHEALHNHYTQKSLSLSPGK

SEQ ID NO: 2593 - protein, 5 aa, synthetic construct
  REGION 1..5: note = Ab0829 CDR H1
NYWMN

SEQ ID NO: 2594 - protein, 19 aa, synthetic construct
  REGION 1..19: note = Ab0829 CDR H2
QIRVKSENFATHYADSVKG

SEQ ID NO: 2595 - protein, 5 aa, synthetic construct
  REGION 1..5: note = Ab0829 CDR H3
YDGFS

SEQ ID NO: 2596 - protein, 12 aa, synthetic construct
  REGION 1..12: note = Ab0829 CDR L1
SASSSVSSGNFH

SEQ ID NO: 2597 - protein, 7 aa, synthetic construct
  REGION 1..7: note = Ab0829 CDR L2
RTSNLAS

SEQ ID NO: 2598 - protein, 9 aa, synthetic construct
  REGION 1..9: note = Ab0829 CDR L3
QQWSGYPYT

SEQ ID NO: 2599 - protein, 215 aa, synthetic construct; identical to SEQ ID NO: 516
  REGION 1..215: note = Ab0830 LC

SEQ ID NO: 2600 - protein, 446 aa, synthetic construct; identical to SEQ ID NO: 2552
  REGION 1..446: note = Ab0830 HC

SEQ ID NO: 2601 - protein, 5 aa, synthetic construct
  REGION 1..5: note = Ab0830 CDR H1
NYWMN

SEQ ID NO: 2602 - protein, 19 aa, synthetic construct
  REGION 1..19: note = Ab0830 CDR H2
QIRVKSENFATHYADSVKG

SEQ ID NO: 2603 - protein, 5 aa, synthetic construct
  REGION 1..5: note = Ab0830 CDR H3
YDGFS

SEQ ID NO: 2604 - protein, 12 aa, synthetic construct
  REGION 1..12: note = Ab0830 CDR L1
SASSSVSSGNFH

SEQ ID NO: 2605 - protein, 7 aa, synthetic construct
  REGION 1..7: note = Ab0830 CDR L2
RTSNLAS

SEQ ID NO: 2606 - protein, 9 aa, synthetic construct
  REGION 1..9: note = Ab0830 CDR L3
QQWSGYPYT

SEQ ID NO: 2607 - protein, 215 aa, synthetic construct; identical to SEQ ID NO: 516
  REGION 1..215: note = Ab0831 LC

SEQ ID NO: 2608 - protein, 446 aa, synthetic construct; identical to SEQ ID NO: 2560
  REGION 1..446: note = Ab0831 HC

SEQ ID NO: 2609 - protein, 5 aa, synthetic construct
  REGION 1..5: note = Ab0831 CDR H1
NYWMN

SEQ ID NO: 2610 - protein, 19 aa, synthetic construct
  REGION 1..19: note = Ab0831 CDR H2
QIRVKSENFATHYADSVKG

SEQ ID NO: 2611 - protein, 5 aa, synthetic construct
  REGION 1..5: note = Ab0831 CDR H3
YDGFS

SEQ ID NO: 2612 - protein, 12 aa, synthetic construct
  REGION 1..12: note = Ab0831 CDR L1
SASSSVSSGNFH

SEQ ID NO: 2613 - protein, 7 aa, synthetic construct
  REGION 1..7: note = Ab0831 CDR L2
RTSNLAS

SEQ ID NO: 2614 - protein, 9 aa, synthetic construct
  REGION 1..9: note = Ab0831 CDR L3
QQWSGYPYT

SEQ ID NO: 2615 - protein, 215 aa, synthetic construct; identical to SEQ ID NO: 516
  REGION 1..215: note = Ab0832 LC

SEQ ID NO: 2616 - protein, 446 aa, synthetic construct; identical to SEQ ID NO: 2568
  REGION 1..446: note = Ab0832 HC

SEQ ID NO: 2617 - protein, 5 aa, synthetic construct
  REGION 1..5: note = Ab0832 CDR H1
NYWMN

SEQ ID NO: 2618 - protein, 19 aa, synthetic construct
  REGION 1..19: note = Ab0832 CDR H2
QIRVKSENFATHYADSVKG

SEQ ID NO: 2619 - protein, 5 aa, synthetic construct
  REGION 1..5: note = Ab0832 CDR H3
YDGFS

SEQ ID NO: 2620 - protein, 12 aa, synthetic construct
  REGION 1..12: note = Ab0832 CDR L1
SASSSVSSGNFH

SEQ ID NO: 2621 - protein, 7 aa, synthetic construct
  REGION 1..7: note = Ab0832 CDR L2
RTSNLAS

SEQ ID NO: 2622 - protein, 9 aa, synthetic construct
  REGION 1..9: note = Ab0832 CDR L3
QQWSGYPYT

SEQ ID NO: 2623 - protein, 215 aa, synthetic construct; identical to SEQ ID NO: 516
  REGION 1..215: note = Ab0833 LC

SEQ ID NO: 2624 - protein, 446 aa, synthetic construct; identical to SEQ ID NO: 2576
  REGION 1..446: note = Ab0833 HC

SEQ ID NO: 2625 - protein, 5 aa, synthetic construct
  REGION 1..5: note = Ab0833 CDR H1
NYWMN

SEQ ID NO: 2626 - protein, 19 aa, synthetic construct
  REGION 1..19: note = Ab0833 CDR H2
QIRVKSENFATHYADSVKG

SEQ ID NO: 2627 - protein, 5 aa, synthetic construct
  REGION 1..5: note = Ab0833 CDR H3
YDGFS

SEQ ID NO: 2628 - protein, 12 aa, synthetic construct
  REGION 1..12: note = Ab0833 CDR L1
SASSSVSSGNFH

SEQ ID NO: 2629 - protein, 7 aa, synthetic construct
  REGION 1..7: note = Ab833 CDR L2
RTSNLAS

SEQ ID NO: 2630 - protein, 9 aa, synthetic construct
  REGION 1..9: note = Ab0833 CDR L3
QQWSGYPYT

SEQ ID NO: 2631 - protein, 215 aa, synthetic construct; identical to SEQ ID NO: 516
  REGION 1..215: note = Ab0834 LC

SEQ ID NO: 2632 - protein, 446 aa, synthetic construct; identical to SEQ ID NO: 2584
  REGION 1..446: note = Ab0834 HC

SEQ ID NO: 2633 - protein, 5 aa, synthetic construct
  REGION 1..5: note = Ab0834 CDR H1
NYWMN

SEQ ID NO: 2634 - protein, 19 aa, synthetic construct
  REGION 1..19: note = Ab0834 CDR H2
QIRVKSENFATHYADSVKG

SEQ ID NO: 2635 - protein, 5 aa, synthetic construct
  REGION 1..5: note = Ab0834 CDR H3
YDGFS

SEQ ID NO: 2636 - protein, 12 aa, synthetic construct
  REGION 1..12: note = Ab0834 CDR L1
SASSSVSSGNFH

SEQ ID NO: 2637 - protein, 7 aa, synthetic construct
  REGION 1..7: note = Ab0834 CDR L2
RTSNLAS

SEQ ID NO: 2638 - protein, 9 aa, synthetic construct
  REGION 1..9: note = Ab0834 CDR L3
QQWSGYPYT

SEQ ID NO: 2639 - protein, 215 aa, synthetic construct; identical to SEQ ID NO: 516
  REGION 1..215: note = Ab0835 LC

SEQ ID NO: 2640 - protein, 446 aa, synthetic construct; identical to SEQ ID NO: 2592
  REGION 1..446: note = Ab0835 HC

SEQ ID NO: 2641 - protein, 5 aa, synthetic construct
  REGION 1..5: note = Ab0835 CDR H1
NYWMN

SEQ ID NO: 2642 - protein, 19 aa, synthetic construct
  REGION 1..19: note = Ab0835 CDR H2
QIRVKSENFATHYADSVKG

SEQ ID NO: 2643 - protein, 5 aa, synthetic construct
  REGION 1..5: note = Ab0835 CDR H3
YDGFS

SEQ ID NO: 2644 - protein, 12 aa, synthetic construct
  REGION 1..12: note = Ab0835 CDR L1
SASSSVSSGNFH

SEQ ID NO: 2645 - protein, 7 aa, synthetic construct
  REGION 1..7: note = Ab0835 CDR L2
RTSNLAS

SEQ ID NO: 2646 - protein, 9 aa, synthetic construct
  REGION 1..9: note = Ab0835 CDR L3
QQWSGYPYT

SEQ ID NO: 2647 - protein, 215 aa, synthetic construct
  REGION 1..215: note = Ab0836 LC
DIQMTQSPSSLSASVGDRVTITCSASSSVSSGNFHWYQQKPGKAPKLWIYRTSNLASGVPSRFSGSGSGTDYTLTISSLQPEDFATYYCQQWSGYPYTFGQGTKVEIKRTVAAPSVFIFPPSDEQLKSGTASVVCLLNNFYPREAKVQWKVDNALQSGNSQESVTEQDSKDSTYSLSSTLTLSKADYEKHKVYACEVTHQGLSSPVTKSFNRGEC

SEQ ID NO: 2648 - protein, 446 aa, synthetic construct; identical to SEQ ID NO: 2552
  REGION 1..446: note = Ab0836 HC

SEQ ID NO: 2649 - protein, 5 aa, synthetic construct
  REGION 1..5: note = Ab0836 CDR H1
NYWMN

SEQ ID NO: 2650 - protein, 19 aa, synthetic construct
  REGION 1..19: note = Ab0836 CDR H2
QIRVKSENFATHYADSVKG

SEQ ID NO: 2651 - protein, 5 aa, synthetic construct
  REGION 1..5: note = Ab0836 CDR H3
YDGFS

SEQ ID NO: 2652 - protein, 12 aa, synthetic construct
  REGION 1..12: note = Ab0836 CDR L1
SASSSVSSGNFH

SEQ ID NO: 2653 - protein, 7 aa, synthetic construct
  REGION 1..7: note = Ab0836 CDR L2
RTSNLAS

SEQ ID NO: 2654 - protein, 9 aa, synthetic construct
  REGION 1..9: note = Ab0836 CDR L3
QQWSGYPYT

SEQ ID NO: 2655 - protein, 215 aa, synthetic construct; identical to SEQ ID NO: 2647
  REGION 1..215: note = Ab0837 LC

SEQ ID NO: 2656 - protein, 446 aa, synthetic construct; identical to SEQ ID NO: 2560
  REGION 1..446: note = Ab0837 HC

SEQ ID NO: 2657 - protein, 5 aa, synthetic construct
  REGION 1..5: note = Ab0837 CDR H1
NYWMN

SEQ ID NO: 2658 - protein, 19 aa, synthetic construct
  REGION 1..19: note = Ab0837 CDR H2
QIRVKSENFATHYADSVKG

SEQ ID NO: 2659 - protein, 5 aa, synthetic construct
  REGION 1..5: note = Ab0837 CDR H3
YDGFS

SEQ ID NO: 2660 - protein, 12 aa, synthetic construct
  REGION 1..12: note = Ab0837 CDR L1
SASSSVSSGNFH

SEQ ID NO: 2661 - protein, 7 aa, synthetic construct
  REGION 1..7: note = Ab0837 CDR L2
RTSNLAS

SEQ ID NO: 2662 - protein, 9 aa, synthetic construct
  REGION 1..9: note = Ab0837 CDR L3
QQWSGYPYT

SEQ ID NO: 2663 - protein, 215 aa, synthetic construct; identical to SEQ ID NO: 2647
  REGION 1..215: note = Ab0838 LC

SEQ ID NO: 2664 - protein, 446 aa, synthetic construct; identical to SEQ ID NO: 2568
  REGION 1..446: note = Ab0838 HC

SEQ ID NO: 2665 - protein, 5 aa, synthetic construct
  REGION 1..5: note = Ab0838 CDR H1
NYWMN

SEQ ID NO: 2666 - protein, 19 aa, synthetic construct
  REGION 1..19: note = Ab0838 CDR H2
QIRVKSENFATHYADSVKG

SEQ ID NO: 2667 - protein, 5 aa, synthetic construct
  REGION 1..5: note = Ab0838 CDR H3
YDGFS

SEQ ID NO: 2668 - protein, 12 aa, synthetic construct
  REGION 1..12: note = Ab0838 CDR L1
SASSSVSSGNFH

SEQ ID NO: 2669 - protein, 7 aa, synthetic construct
  REGION 1..7: note = Ab0838 CDR L2
RTSNLAS

SEQ ID NO: 2670 - protein, 9 aa, synthetic construct
  REGION 1..9: note = Ab0838 CDR L3
QQWSGYPYT

SEQ ID NO: 2671 - protein, 215 aa, synthetic construct; identical to SEQ ID NO: 2647
  REGION 1..215: note = Ab0839 LC

SEQ ID NO: 2672 - protein, 446 aa, synthetic construct; identical to SEQ ID NO: 2576
  REGION 1..446: note = Ab0839 HC

SEQ ID NO: 2673 - protein, 5 aa, synthetic construct
  REGION 1..5: note = Ab0839 CDR H1
NYWMN

SEQ ID NO: 2674 - protein, 19 aa, synthetic construct
  REGION 1..19: note = Ab0839 CDR H2
QIRVKSENFATHYADSVKG

SEQ ID NO: 2675 - protein, 5 aa, synthetic construct
  REGION 1..5: note = Ab0839 CDR H3
YDGFS

SEQ ID NO: 2676 - protein, 12 aa, synthetic construct
  REGION 1..12: note = Ab0839 CDR L1
SASSSVSSGNFH

SEQ ID NO: 2677 - protein, 7 aa, synthetic construct
  REGION 1..7: note = Ab0839 CDR L2
RTSNLAS

SEQ ID NO: 2678 - protein, 9 aa, synthetic construct
  REGION 1..9: note = Ab0839 CDR L3
QQWSGYPYT

SEQ ID NO: 2679 - protein, 215 aa, synthetic construct; identical to SEQ ID NO: 2647
  REGION 1..215: note = Ab0840 LC

SEQ ID NO: 2680 - protein, 446 aa, synthetic construct; identical to SEQ ID NO: 2584
  REGION 1..446: note = Ab0840 HC

SEQ ID NO: 2681 - protein, 5 aa, synthetic construct
  REGION 1..5: note = Ab0840 CDR H1
NYWMN

SEQ ID NO: 2682 - protein, 19 aa, synthetic construct
  REGION 1..19: note = Ab0840 CDR H2
QIRVKSENFATHYADSVKG

SEQ ID NO: 2683 - protein, 5 aa, synthetic construct
  REGION 1..5: note = Ab0840 CDR H3
YDGFS

SEQ ID NO: 2684 - protein, 12 aa, synthetic construct
  REGION 1..12: note = Ab0840 CDR L1
SASSSVSSGNFH

SEQ ID NO: 2685 - protein, 7 aa, synthetic construct
  REGION 1..7: note = Ab0840 CDR L2
RTSNLAS

SEQ ID NO: 2686 - protein, 9 aa, synthetic construct
  REGION 1..9: note = Ab0840 CDR L3
QQWSGYPYT

SEQ ID NO: 2687 - protein, 215 aa, synthetic construct; identical to SEQ ID NO: 2647
  REGION 1..215: note = Ab0841 LC

SEQ ID NO: 2688 - protein, 446 aa, synthetic construct; identical to SEQ ID NO: 2592
  REGION 1..446: note = Ab0841 HC

SEQ ID NO: 2689 - protein, 5 aa, synthetic construct
  REGION 1..5: note = Ab0841 CDR H1
NYWMN

SEQ ID NO: 2690 - protein, 19 aa, synthetic construct
  REGION 1..19: note = Ab0841 CDR H2
QIRVKSENFATHYADSVKG

SEQ ID NO: 2691 - protein, 5 aa, synthetic construct
  REGION 1..5: note = Ab0841 CDR H3
YDGFS

SEQ ID NO: 2692 - protein, 12 aa, synthetic construct
  REGION 1..12: note = Ab0841 CDR L1
SASSSVSSGNFH

SEQ ID NO: 2693 - protein, 7 aa, synthetic construct
  REGION 1..7: note = Ab0841 CDR L2
RTSNLAS

SEQ ID NO: 2694 - protein, 9 aa, synthetic construct
  REGION 1..9: note = Ab0841 CDR L3
QQWSGYPYT

SEQ ID NO: 2695 - protein, 215 aa, synthetic construct
  REGION 1..215: note = Ab0842 LC
DNQMTQSPSSLSASVGDRVTITCSASSSVSSGNFHWYQQKPGKAPKLWIYRTSNLASGVPSRFSGSGSGTDYTLTISSLQPEDFATYYCQQWSGYPYTFGQGTKVEIKRTVAAPSVFIFPPSDEQLKSGTASVVCLLNNFYPREAKVQWKVDNALQSGNSQESVTEQDSKDSTYSLSSTLTLSKADYEKHKVYACEVTHQGLSSPVTKSFNRGEC

SEQ ID NO: 2696 - protein, 446 aa, synthetic construct; identical to SEQ ID NO: 2552
  REGION 1..446: note = Ab0842 HC

SEQ ID NO: 2697 - protein, 5 aa, synthetic construct
  REGION 1..5: note = Ab0842 CDR H1
NYWMN

SEQ ID NO: 2698 - protein, 19 aa, synthetic construct
  REGION 1..19: note = Ab0842 CDR H2
QIRVKSENFATHYADSVKG

SEQ ID NO: 2699 - protein, 5 aa, synthetic construct
  REGION 1..5: note = Ab0842 CDR H3
YDGFS

SEQ ID NO: 2700 - protein, 12 aa, synthetic construct
  REGION 1..12: note = Ab0842 CDR L1
SASSSVSSGNFH

SEQ ID NO: 2701 - protein, 7 aa, synthetic construct
  REGION 1..7: note = Ab0842 CDR L2
RTSNLAS

SEQ ID NO: 2702 - protein, 9 aa, synthetic construct
  REGION 1..9: note = Ab0842 CDR L3
QQWSGYPYT

SEQ ID NO: 2703 - protein, 215 aa, synthetic construct; identical to SEQ ID NO: 2695
  REGION 1..215: note = Ab0843 LC

SEQ ID NO: 2704 - protein, 446 aa, synthetic construct; identical to SEQ ID NO: 2560
  REGION 1..446: note = Ab0843 HC

SEQ ID NO: 2705 - protein, 5 aa, synthetic construct
  REGION 1..5: note = Ab0843 CDR H1
NYWMN

SEQ ID NO: 2706 - protein, 19 aa, synthetic construct
  REGION 1..19: note = Ab0843 CDR H2
QIRVKSENFATHYADSVKG

SEQ ID NO: 2707 - protein, 5 aa, synthetic construct
  REGION 1..5: note = Ab0843 CDR H3
YDGFS

SEQ ID NO: 2708 - protein, 12 aa, synthetic construct
  REGION 1..12: note = Ab0843 CDR L1
SASSSVSSGNFH

SEQ ID NO: 2709 - protein, 7 aa, synthetic construct
  REGION 1..7: note = Ab0843 CDR L2
RTSNLAS

SEQ ID NO: 2710 - protein, 9 aa, synthetic construct
  REGION 1..9: note = Ab0843 CDR L3
QQWSGYPYT

SEQ ID NO: 2711 - protein, 215 aa, synthetic construct; identical to SEQ ID NO: 2695
  REGION 1..215: note = Ab0844 LC

SEQ ID NO: 2712 - protein, 446 aa, synthetic construct; identical to SEQ ID NO: 2568
  REGION 1..446: note = Ab0844 HC

SEQ ID NO: 2713 - protein, 5 aa, synthetic construct
  REGION 1..5: note = Ab0844 CDR H1
NYWMN

SEQ ID NO: 2714 - protein, 19 aa, synthetic construct
  REGION 1..19: note = Ab0844 CDR H2
QIRVKSENFATHYADSVKG

SEQ ID NO: 2715 - protein, 5 aa, synthetic construct
  REGION 1..5: note = Ab0844 CDR H3
YDGFS

SEQ ID NO: 2716 - protein, 12 aa, synthetic construct
  REGION 1..12: note = Ab0844 CDR L1
SASSSVSSGNFH

SEQ ID NO: 2717 - protein, 7 aa, synthetic construct
  REGION 1..7: note = Ab0844 CDR L2
RTSNLAS

SEQ ID NO: 2718 - protein, 9 aa, synthetic construct
  REGION 1..9: note = Ab0844 CDR L3
QQWSGYPYT

SEQ ID NO: 2719 - protein, 215 aa, synthetic construct; identical to SEQ ID NO: 2695
  REGION 1..215: note = Ab0845 LC

SEQ ID NO: 2720 - protein, 446 aa, synthetic construct; identical to SEQ ID NO: 2576
  REGION 1..446: note = Ab0845 HC

SEQ ID NO: 2721 - protein, 5 aa, synthetic construct
  REGION 1..5: note = Ab0845 CDR H1
NYWMN

SEQ ID NO: 2722 - protein, 19 aa, synthetic construct
  REGION 1..19: note = Ab0845 CDR H2
QIRVKSENFATHYADSVKG

SEQ ID NO: 2723 - protein, 5 aa, synthetic construct
  REGION 1..5: note = Ab0845 CDR H3
YDGFS

SEQ ID NO: 2724 - protein, 12 aa, synthetic construct
  REGION 1..12: note = Ab0845 CDR L1
SASSSVSSGNFH

SEQ ID NO: 2725 - protein, 7 aa, synthetic construct
  REGION 1..7: note = Ab0845 CDR L2
RTSNLAS

SEQ ID NO: 2726 - protein, 9 aa, synthetic construct
  REGION 1..9: note = Ab0845 CDR L3
QQWSGYPYT

SEQ ID NO: 2727 - protein, 215 aa, synthetic construct; identical to SEQ ID NO: 2695
  REGION 1..215: note = Ab0846 LC

SEQ ID NO: 2728 - protein, 446 aa, synthetic construct; identical to SEQ ID NO: 2584
  REGION 1..446: note = Ab0846 HC

SEQ ID NO: 2729 - protein, 5 aa, synthetic construct
  REGION 1..5: note = Ab0846 CDR H1
NYWMN

SEQ ID NO: 2730 - protein, 19 aa, synthetic construct
  REGION 1..19: note = Ab0846 CDR H2
QIRVKSENFATHYADSVKG

SEQ ID NO: 2731 - protein, 5 aa, synthetic construct
  REGION 1..5: note = Ab0846 CDR H3
YDGFS

SEQ ID NO: 2732 - protein, 12 aa, synthetic construct
  REGION 1..12: note = Ab0846 CDR L1
SASSSVSSGNFH

SEQ ID NO: 2733 - protein, 7 aa, synthetic construct
  REGION 1..7: note = Ab0846 CDR L2
RTSNLAS

SEQ ID NO: 2734 - protein, 9 aa, synthetic construct
  REGION 1..9: note = Ab0846 CDR L3
QQWSGYPYT

SEQ ID NO: 2735 - protein, 215 aa, synthetic construct; identical to SEQ ID NO: 2695
  REGION 1..215: note = Ab0847 LC

SEQ ID NO: 2736 - protein, 446 aa, synthetic construct; identical to SEQ ID NO: 2592
  REGION 1..446: note = Ab0847 HC

SEQ ID NO: 2737 - protein, 5 aa, synthetic construct
  REGION 1..5: note = Ab0847 CDR H1
NYWMN

SEQ ID NO: 2738 - protein, 19 aa, synthetic construct
  REGION 1..19: note = Ab0847 CDR H2
QIRVKSENFATHYADSVKG

SEQ ID NO: 2739 - protein, 5 aa, synthetic construct
  REGION 1..5: note = Ab0847 CDR H3
YDGFS

SEQ ID NO: 2740 - protein, 12 aa, synthetic construct
  REGION 1..12: note = Ab0847 CDR L1
SASSSVSSGNFH

SEQ ID NO: 2741 - protein, 7 aa, synthetic construct
  REGION 1..7: note = Ab0847 CDR L2
RTSNLAS

SEQ ID NO: 2742 - protein, 9 aa, synthetic construct
  REGION 1..9: note = Ab0847 CDR L3
QQWSGYPYT

SEQ ID NO: 2743 - protein, 219 aa, synthetic construct
  REGION 1..219: note = Ab0798 LC
DVVMTQTPLSLPVSLGDEASISCRSSQSLIHINRNTYLYWYLQKPGQSPKLLIYRVSNRFSGVPDRFSGSGSGTDFTLKVSRVEAEDLGVYFCFQTTHVPYTFGSGTKLEIKRTVAAPSVFIFPPSDEQLKSGTASVVCLLNNFYPREAKVQWKVDNALQSGNSQESVTEQDSKDSTYSLSSTLTLSKADYEKHKVYACEVTHQGLSSPVTKSFNRGEC

SEQ ID NO: 2744 - protein, 453 aa, synthetic construct
  REGION 1..453: note = Ab0798 HC
QVQLEQSGAELVKPGASVKLSCKASGYTFTEYTIHWVKQRSGQGLEWIGWFYPGNDNIKYNEKFKDRATLTADKSSHTVYLELSRLTSEDSAVFFCARHEDKYFYGSSYFDYWGQGTTLTVSSASTKGPSVFPLAPSSKSTSGGTAALGCLVKDYFPEPVTVSWNSGALTSGVHTFPAVLQSSGLYSLSSVVTVPSSSLGTQTYICNVNHKPSNTKVDKKVEPKSCDKTHTCPPCPAPEAAGGPSVFLFPPKPKDTLMISRTPEVTCVVVDVSHEDPEVKFNWYVDGVEVHNAKTKPREEQYNSTYRVVSVLTVLHQDWLNGKEYKCKVSNKALGAPIEKTISKAKGQPREPQVYTLPPSRDELTKNQVSLTCLVKGFYPSDIAVEWESNGQPENNYKTTPPVLDSDGSFFLYSKLTVDKSRWQQGNVFSCSVMHEALHNHYTQKSLSLSPGK

SEQ ID NO: 2745 - protein, 5 aa, synthetic construct
  REGION 1..5: note = Ab0798 CDR H1
EYTIH

SEQ ID NO: 2746 - protein, 17 aa, synthetic construct
  REGION 1..17: note = Ab0798 CDR H2
WFYPGNDNIKYNEKFKD

SEQ ID NO: 2747 - protein, 14 aa, synthetic construct
  REGION 1..14: note = Ab0798 CDR H3
HEDKYFYGSSYFDY

SEQ ID NO: 2748 - protein, 16 aa, synthetic construct
  REGION 1..16: note = Ab0798 CDR L1
RSSQSLIHINRNTYLY

SEQ ID NO: 2749 - protein, 7 aa, synthetic construct
  REGION 1..7: note = Ab0798 CDR L2
RVSNRFS

SEQ ID NO: 2750 - protein, 9 aa, synthetic construct
  REGION 1..9: note = Ab0798 CDR L3
FQTTHVPYT

SEQ ID NO: 2751 - protein, 219 aa, synthetic construct
  REGION 1..219: note = Ab0800 LC
DIVMTQSPLSLPVTPGEPASISCRSSQSLIHINRNTYLYWYLQKPGQSPQLLIYRVSNRFSGVPDRFSGSGSGTDFTLKISRVEAEDVGVYYCFQTTHVPYTFGQGTKVEIKRTVAAPSVFIFPPSDEQLKSGTASVVCLLNNFYPREAKVQWKVDNALQSGNSQESVTEQDSKDSTYSLSSTLTLSKADYEKHKVYACEVTHQGLSSPVTKSFNRGEC

SEQ ID NO: 2752 - protein, 453 aa, synthetic construct
  REGION 1..453: note = Ab0800 HC
QVQLVQSGAEVKKPGASVKVSCKASGYTFTEYTIHWVRQAPGQGLEWIGWFYPGNDNIKYAQKFQGRVTMTRDTSISTAYMELSSLRSEDTAVYFCARHEDKYFYGSSYFDYWGQGTLVTVSSASTKGPSVFPLAPSSKSTSGGTAALGCLVKDYFPEPVTVSWNSGALTSGVHTFPAVLQSSGLYSLSSVVTVPSSSLGTQTYICNVNHKPSNTKVDKKVEPKSCDKTHTCPPCPAPEAAGGPSVFLFPPKPKDTLMISRTPEVTCVVVDVSHEDPEVKFNWYVDGVEVHNAKTKPREEQYNSTYRVVSVLTVLHQDWLNGKEYKCKVSNKALGAPIEKTISKAKGQPREPQVYTLPPSRDELTKNQVSLTCLVKGFYPSDIAVEWESNGQPENNYKTTPPVLDSDGSFFLYSKLTVDKSRWQQGNVFSCSVMHEALHNHYTQKSLSLSPGK

SEQ ID NO: 2753 - protein, 17 aa, synthetic construct
  REGION 1..17: note = Ab0800 CDR H1
WFYPGNDNIKYAQKFQG

SEQ ID NO: 2754 - protein, 14 aa, synthetic construct
  REGION 1..14: note = Ab0800 CDR H2
HEDKYFYGSSYFDY

SEQ ID NO: 2755 - protein, 16 aa, synthetic construct
  REGION 1..16: note = Ab0800 CDR H3
RSSQSLIHINRNTYLY

SEQ ID NO: 2756 - protein, 7 aa, synthetic construct
  REGION 1..7: note = Ab0800 CDR L1
RVSNRFS

SEQ ID NO: 2757 - protein, 9 aa, synthetic construct
  REGION 1..9: note = Ab0800 CDR L2
FQTTHVPYT

SEQ ID NO: 2758 - protein, 17 aa, synthetic construct
  REGION 1..17: note = Ab0800 CDR L3
WFYPGNDNIKYAQKFQG

SEQ ID NO: 2759 - protein, 213 aa, synthetic construct
  REGION 1..213: note = Ab0848 LC
SIVMTQTPKFLPVSAGDRVTMTCKASQSVGNNVAWYQQKPGQSPKLLIYYASNRYTGVPDRFTGSGSGTDFTFTISSVQVEDLAVYFCQQHYSSRTFGGGTKLEIKRTVAAPSVFIFPPSDEQLKSGTASVVCLLNNFYPREAKVQWKVDNALQSGNSQESVTEQDSKDSTYSLSSTLTLSKADYEKHKVYACEVTHQGLSSPVTKSFNRGEC

SEQ ID NO: 2760 - protein, 446 aa, synthetic construct
  REGION 1..446: note = Ab0848 HC
QVQLQQSGAELMKPGASVKLSCKATGYTFTGYSIEWIKQRPGHGLEWIGEILPGSGYTNYNEKFKGKATFTADTSSNTAYMQLSSLTTEDSAIYYCARDGPPFAYWGQGTLVTVSAASTKGPSVFPLAPSSKSTSGGTAALGCLVKDYFPEPVTVSWNSGALTSGVHTFPAVLQSSGLYSLSSVVTVPSSSLGTQTYICNVNHKPSNTKVDKKVEPKSCDKTHTCPPCPAPEAAGGPSVFLFPPKPKDTLMISRTPEVTCVVVDVSHEDPEVKFNWYVDGVEVHNAKTKPREEQYNSTYRVVSVLTVLHQDWLNGKEYKCKVSNKALGAPIEKTISKAKGQPREPQVYTLPPSRDELTKNQVSLTCLVKGFYPSDIAVEWESNGQPENNYKTTPPVLDSDGSFFLYSKLTVDKSRWQQGNVFSCSVMHEALHNHYTQKSLSLSPGK

SEQ ID NO: 2761 - protein, 17 aa, synthetic construct
  REGION 1..17: note = CDR H1
EILPGSGYTNYNEKFKG

SEQ ID NO: 2762 - protein, 7 aa, synthetic construct
  REGION 1..7: note = Ab0848 CDR H2
DGPPFAY

SEQ ID NO: 2763 - protein, 11 aa, synthetic construct
  REGION 1..11: note = Ab0848 CDR H3
KASQSVGNNVA

SEQ ID NO: 2764 - protein, 7 aa, synthetic construct
  REGION 1..7: note = Ab0848 CDR L1
YASNRYT

SEQ ID NO: 2765 - protein, 8 aa, synthetic construct
  REGION 1..8: note = Ab0848 CDR L2
QQHYSSRT

SEQ ID NO: 2766 - protein, 17 aa, synthetic construct
  REGION 1..17: note = Ab0848 CDR L3
EILPGSGYTNYNEKFKG

SEQ ID NO: 2767 - protein, 215 aa, synthetic construct; identical to SEQ ID NO: 516
  REGION 1..215: note = Ab1008 LC

SEQ ID NO: 2768 - protein, 446 aa, synthetic construct
  REGION 1..446: note = Ab1008 HC
EVQLVESGGGLVQPGGSLRLSCAASGFTFSNYWMNWVRQAPGKGLEWVAQIRVKSENFATHYADSVKGRFTISRDNSKSTVYLQMNSLRAEDTAVYYCTLYDGFSWGQGTLVTVSSASTKGPSVFPLAPSSKSTSGGTAALGCLVKDYFPEPVTVSWNSGALTSGVHTFPAVLQSSGLYSLSSVVTVPSSSLGTQTYICNVNHKPSNTKVDKKVEPKSCDKTHTCPPCPAPEAAGGPSVFLFPPKPKDTLMISRTPEVTCVVVDVSHEDPEVKFNWYVDGVEVHNAKTKPREEQYNSTYRVVSVLTVLHQDWLNGKEYKCKVSNKALGAPIEKTISKAKGQPREPQVYTLPPSRDELTKNQVSLTCLVKGFYPSDIAVEWESNGQPENNYKTTPPVLDSDGSFFLYSKLTVDKSRWQQGNVFSCSVMHEALHNHYTQKSLSLSPGK

SEQ ID NO: 2769 - protein, 5 aa, synthetic construct
  REGION 1..5: note = Ab01008 CDR H1
NYWMN

SEQ ID NO: 2770 - protein, 19 aa, synthetic construct
  REGION 1..19: note = Ab1008 CDR H2
QIRVKSENFATHYADSVKG

SEQ ID NO: 2771 - protein, 5 aa, synthetic construct
  REGION 1..5: note = Ab1008 CDR H3
YDGFS

SEQ ID NO: 2772 - protein, 12 aa, synthetic construct
  REGION 1..12: note = Ab1008 CDR L1
SASSSVSSGNFH

SEQ ID NO: 2773 - protein, 7 aa, synthetic construct
  REGION 1..7: note = Ab1008 CDR L2
RTSNLAS

SEQ ID NO: 2774 - protein, 9 aa, synthetic construct
  REGION 1..9: note = Ab1008 CDR L3
QQWSGYPYT

SEQ ID NO: 2775 - protein, 215 aa, synthetic construct; identical to SEQ ID NO: 516
  REGION 1..215: note = Ab1009 LC

SEQ ID NO: 2776 - protein, 446 aa, synthetic construct
  REGION 1..446: note = Ab1009 HC
EVQLVESGGGLVQPGGSLRLSCAASGFTFSNYWMNWVRQAPGKGLEWVAQIRVKSENFATHYADSVKGRFTISRDDSKNTVYLQMNSLRAEDTAVYYCTLYDGFSWGQGTLVTVSSASTKGPSVFPLAPSSKSTSGGTAALGCLVKDYFPEPVTVSWNSGALTSGVHTFPAVLQSSGLYSLSSVVTVPSSSLGTQTYICNVNHKPSNTKVDKKVEPKSCDKTHTCPPCPAPEAAGGPSVFLFPPKPKDTLMISRTPEVTCVVVDVSHEDPEVKFNWYVDGVEVHNAKTKPREEQYNSTYRVVSVLTVLHQDWLNGKEYKCKVSNKALGAPIEKTISKAKGQPREPQVYTLPPSRDELTKNQVSLTCLVKGFYPSDIAVEWESNGQPENNYKTTPPVLDSDGSFFLYSKLTVDKSRWQQGNVFSCSVMHEALHNHYTQKSLSLSPGK

SEQ ID NO: 2777 - protein, 5 aa, synthetic construct
  REGION 1..5: note = Ab1009 CDR H1
NYWMN

SEQ ID NO: 2778 - protein, 19 aa, synthetic construct
  REGION 1..19: note = Ab1009 CDR H2
QIRVKSENFATHYADSVKG

SEQ ID NO: 2779 - protein, 5 aa, synthetic construct
  REGION 1..5: note = Ab1009 CDR H3
YDGFS

SEQ ID NO: 2780 - protein, 12 aa, synthetic construct
  REGION 1..12: note = Ab1009 CDR L1
SASSSVSSGNFH

SEQ ID NO: 2781 - protein, 7 aa, synthetic construct
  REGION 1..7: note = Ab1009 CDR L2
RTSNLAS

SEQ ID NO: 2782 - protein, 9 aa, synthetic construct
  REGION 1..9: note = Ab1009 CDR L3
QQWSGYPYT

SEQ ID NO: 2783 - protein, 215 aa, synthetic construct; identical to SEQ ID NO: 516
  REGION 1..215: note = Ab1010 LC

SEQ ID NO: 2784 - protein, 446 aa, synthetic construct
  REGION 1..446: note = Ab1010 HC
EVQLVESGGGLVQPGGSLRLSCAASGFTFSNYWMNWVRQAPGKGLEWVAQIRVKSENFATHYADSVKGRFTISRDDSKSTVYLQMNSLRAEDTAVYYCALYDGFSWGQGTLVTVSSASTKGPSVFPLAPSSKSTSGGTAALGCLVKDYFPEPVTVSWNSGALTSGVHTFPAVLQSSGLYSLSSVVTVPSSSLGTQTYICNVNHKPSNTKVDKKVEPKSCDKTHTCPPCPAPEAAGGPSVFLFPPKPKDTLMISRTPEVTCVVVDVSHEDPEVKFNWYVDGVEVHNAKTKPREEQYNSTYRVVSVLTVLHQDWLNGKEYKCKVSNKALGAPIEKTISKAKGQPREPQVYTLPPSRDELTKNQVSLTCLVKGFYPSDIAVEWESNGQPENNYKTTPPVLDSDGSFFLYSKLTVDKSRWQQGNVFSCSVMHEALHNHYTQKSLSLSPGK

SEQ ID NO: 2785 - protein, 5 aa, synthetic construct
  REGION 1..5: note = Ab1010 CDR H1
NYWMN

SEQ ID NO: 2786 - protein, 19 aa, synthetic construct
  REGION 1..19: note = Ab1010 CDR H2
QIRVKSENFATHYADSVKG

SEQ ID NO: 2787 - protein, 5 aa, synthetic construct
  REGION 1..5: note = Ab1010 CDR H3
YDGFS

SEQ ID NO: 2788 - protein, 12 aa, synthetic construct
  REGION 1..12: note = Ab1010 CDR L1
SASSSVSSGNFH

SEQ ID NO: 2789 - protein, 7 aa, synthetic construct
  REGION 1..7: note = Ab1010 CDR L2
RTSNLAS

SEQ ID NO: 2790 - protein, 9 aa, synthetic construct
  REGION 1..9: note = Ab1010 CDR L3
QQWSGYPYT

SEQ ID NO: 2791 - protein, 215 aa, synthetic construct; identical to SEQ ID NO: 516
  REGION 1..215: note = Ab1011 LC

SEQ ID NO: 2792 - protein, 446 aa, synthetic construct
  REGION 1..446: note = Ab1011 HC
EVQLVESGGGLVQPGGSLRLSCAASGFTFSNYWMNWVRQAPGKGLEWVAQIRVKSENFATHYADSVKGRFTISRDDSKSTVYLQMNSLRAEDTAVYYCTRYDGFSWGQGTLVTVSSASTKGPSVFPLAPSSKSTSGGTAALGCLVKDYFPEPVTVSWNSGALTSGVHTFPAVLQSSGLYSLSSVVTVPSSSLGTQTYICNVNHKPSNTKVDKKVEPKSCDKTHTCPPCPAPEAAGGPSVFLFPPKPKDTLMISRTPEVTCVVVDVSHEDPEVKFNWYVDGVEVHNAKTKPREEQYNSTYRVVSVLTVLHQDWLNGKEYKCKVSNKALGAPIEKTISKAKGQPREPQVYTLPPSRDELTKNQVSLTCLVKGFYPSDIAVEWESNGQPENNYKTTPPVLDSDGSFFLYSKLTVDKSRWQQGNVFSCSVMHEALHNHYTQKSLSLSPGK

SEQ ID NO: 2793 - protein, 5 aa, synthetic construct
  REGION 1..5: note = Ab1011 CDR H1
NYWMN

SEQ ID NO: 2794 - protein, 19 aa, synthetic construct
  REGION 1..19: note = Ab1011 CDR H2
QIRVKSENFATHYADSVKG

SEQ ID NO: 2795 - protein, 5 aa, synthetic construct
  REGION 1..5: note = Ab1011 CDR H3
YDGFS

SEQ ID NO: 2796 - protein, 12 aa, synthetic construct
  REGION 1..12: note = Ab1011 CDR L1
SASSSVSSGNFH

SEQ ID NO: 2797 - protein, 7 aa, synthetic construct
  REGION 1..7: note = Ab1011 CDR L2
RTSNLAS

SEQ ID NO: 2798 - protein, 9 aa, synthetic construct
  REGION 1..9: note = Ab1011 CDR L3
QQWSGYPYT

SEQ ID NO: 2799 - protein, 215 aa, synthetic construct; identical to SEQ ID NO: 516
  REGION 1..215: note = Ab1012 LC

SEQ ID NO: 2800 - protein, 446 aa, synthetic construct
  REGION 1..446: note = Ab1012 HC
EVQLVESGGGLVQPGGSLRLSCAASGFTFSSYWMNWVRQAPGKGLEWVAQIRVKSENFATHYADSVKGRFTISRDDSKSTVYLQMNSLRAEDTAVYYCTLYDGFSWGQGTLVTVSSASTKGPSVFPLAPSSKSTSGGTAALGCLVKDYFPEPVTVSWNSGALTSGVHTFPAVLQSSGLYSLSSVVTVPSSSLGTQTYICNVNHKPSNTKVDKKVEPKSCDKTHTCPPCPAPEAAGGPSVFLFPPKPKDTLMISRTPEVTCVVVDVSHEDPEVKFNWYVDGVEVHNAKTKPREEQYNSTYRVVSVLTVLHQDWLNGKEYKCKVSNKALGAPIEKTISKAKGQPREPQVYTLPPSRDELTKNQVSLTCLVKGFYPSDIAVEWESNGQPENNYKTTPPVLDSDGSFFLYSKLTVDKSRWQQGNVFSCSVMHEALHNHYTQKSLSLSPGK

SEQ ID NO: 2801 - protein, 5 aa, synthetic construct
  REGION 1..5: note = Ab1012 cDR H1
SYWMN

SEQ ID NO: 2802 - protein, 19 aa, synthetic construct
  REGION 1..19: note = Ab1012 CDR H2
QIRVKSENFATHYADSVKG

SEQ ID NO: 2803 - protein, 5 aa, synthetic construct
  REGION 1..5: note = Ab1012 CDR H3
YDGFS

SEQ ID NO: 2804 - protein, 12 aa, synthetic construct
  REGION 1..12: note = Ab1012 CDR L1
SASSSVSSGNFH

SEQ ID NO: 2805 - protein, 7 aa, synthetic construct
  REGION 1..7: note = Ab1012 CDR L2
RTSNLAS

SEQ ID NO: 2806 - protein, 9 aa, synthetic construct
  REGION 1..9: note = Ab1012 CDR L3
QQWSGYPYT

SEQ ID NO: 2807 - protein, 215 aa, synthetic construct; identical to SEQ ID NO: 516
  REGION 1..215: note = Ab1013 LC

SEQ ID NO: 2808 - protein, 446 aa, synthetic construct
  REGION 1..446: note = Ab1013 HC
EVQLVESGGGLVQPGGSLRLSCAASGFTFSNYAMNWVRQAPGKGLEWVAQIRVKSENFATHYADSVKGRFTISRDDSKSTVYLQMNSLRAEDTAVYYCTLYDGFSWGQGTLVTVSSASTKGPSVFPLAPSSKSTSGGTAALGCLVKDYFPEPVTVSWNSGALTSGVHTFPAVLQSSGLYSLSSVVTVPSSSLGTQTYICNVNHKPSNTKVDKKVEPKSCDKTHTCPPCPAPEAAGGPSVFLFPPKPKDTLMISRTPEVTCVVVDVSHEDPEVKFNWYVDGVEVHNAKTKPREEQYNSTYRVVSVLTVLHQDWLNGKEYKCKVSNKALGAPIEKTISKAKGQPREPQVYTLPPSRDELTKNQVSLTCLVKGFYPSDIAVEWESNGQPENNYKTTPPVLDSDGSFFLYSKLTVDKSRWQQGNVFSCSVMHEALHNHYTQKSLSLSPGK

SEQ ID NO: 2809 - protein, 5 aa, synthetic construct
  REGION 1..5: note = Ab1013 CDR H1
NYAMN

SEQ ID NO: 2810 - protein, 18 aa, synthetic construct
  REGION 1..18: note = Ab1013 CDR H2
QIRVKSENFATHYADSVK

SEQ ID NO: 2811 - protein, 5 aa, synthetic construct
  REGION 1..5: note = Ab1013 CDR H3
YDGFS

SEQ ID NO: 2812 - protein, 12 aa, synthetic construct
  REGION 1..12: note = Ab1013 CDR L1
SASSSVSSGNFH

SEQ ID NO: 2813 - protein, 7 aa, synthetic construct
  REGION 1..7: note = Ab1013 CDR L2
RTSNLAS

SEQ ID NO: 2814 - protein, 9 aa, synthetic construct
  REGION 1..9: note = Ab1013 CDR L3
QQWSGYPYT

SEQ ID NO: 2815 - protein, 215 aa, synthetic construct; identical to SEQ ID NO: 516
  REGION 1..215: note = Ab1014 LC

SEQ ID NO: 2816 - protein, 446 aa, synthetic construct
  REGION 1..446: note = Ab1014 HC
EVQLVESGGGLVQPGGSLRLSCAASGFTFSNYFMNWVRQAPGKGLEWVAQIRVKSENFATHYADSVKGRFTISRDDSKSTVYLQMNSLRAEDTAVYYCTLYDGFSWGQGTLVTVSSASTKGPSVFPLAPSSKSTSGGTAALGCLVKDYFPEPVTVSWNSGALTSGVHTFPAVLQSSGLYSLSSVVTVPSSSLGTQTYICNVNHKPSNTKVDKKVEPKSCDKTHTCPPCPAPEAAGGPSVFLFPPKPKDTLMISRTPEVTCVVVDVSHEDPEVKFNWYVDGVEVHNAKTKPREEQYNSTYRVVSVLTVLHQDWLNGKEYKCKVSNKALGAPIEKTISKAKGQPREPQVYTLPPSRDELTKNQVSLTCLVKGFYPSDIAVEWESNGQPENNYKTTPPVLDSDGSFFLYSKLTVDKSRWQQGNVFSCSVMHEALHNHYTQKSLSLSPGK

SEQ ID NO: 2817 - protein, 5 aa, synthetic construct
  REGION 1..5: note = Ab1014 CDR H1
NYFMN

SEQ ID NO: 2818 - protein, 19 aa, synthetic construct
  REGION 1..19: note = Ab1014 CDR H2
QIRVKSENFATHYADSVKG

SEQ ID NO: 2819 - protein, 5 aa, synthetic construct
  REGION 1..5: note = Ab1014 CDR H3
YDGFS

SEQ ID NO: 2820 - protein, 12 aa, synthetic construct
  REGION 1..12: note = Ab1014 CDR L1
SASSSVSSGNFH

SEQ ID NO: 2821 - protein, 7 aa, synthetic construct
  REGION 1..7: note = Ab1014 CDR L2
RTSNLAS

SEQ ID NO: 2822 - protein, 9 aa, synthetic construct
  REGION 1..9: note = Ab1014 CDR L3
QQWSGYPYT

SEQ ID NO: 2823 - protein, 215 aa, synthetic construct; identical to SEQ ID NO: 516
  REGION 1..215: note = Ab1015 LC

SEQ ID NO: 2824 - protein, 446 aa, synthetic construct
  REGION 1..446: note = Ab1015 HC
EVQLVESGGGLVQPGGSLRLSCAASGFTFSNYHMNWVRQAPGKGLEWVAQIRVKSENFATHYADSVKGRFTISRDDSKSTVYLQMNSLRAEDTAVYYCTLYDGFSWGQGTLVTVSSASTKGPSVFPLAPSSKSTSGGTAALGCLVKDYFPEPVTVSWNSGALTSGVHTFPAVLQSSGLYSLSSVVTVPSSSLGTQTYICNVNHKPSNTKVDKKVEPKSCDKTHTCPPCPAPEAAGGPSVFLFPPKPKDTLMISRTPEVTCVVVDVSHEDPEVKFNWYVDGVEVHNAKTKPREEQYNSTYRVVSVLTVLHQDWLNGKEYKCKVSNKALGAPIEKTISKAKGQPREPQVYTLPPSRDELTKNQVSLTCLVKGFYPSDIAVEWESNGQPENNYKTTPPVLDSDGSFFLYSKLTVDKSRWQQGNVFSCSVMHEALHNHYTQKSLSLSPGK

SEQ ID NO: 2825 - protein, 5 aa, synthetic construct
  REGION 1..5: note = Ab1015 CDR H1
NYHMN

SEQ ID NO: 2826 - protein, 19 aa, synthetic construct
  REGION 1..19: note = Ab1015 CDR H2
QIRVKSENFATHYADSVKG

SEQ ID NO: 2827 - protein, 5 aa, synthetic construct
  REGION 1..5: note = Ab1015 CDR H3
YDGFS

SEQ ID NO: 2828 - protein, 12 aa, synthetic construct
  REGION 1..12: note = Ab1015 CDR L1
SASSSVSSGNFH

SEQ ID NO: 2829 - protein, 7 aa, synthetic construct
  REGION 1..7: note = Ab1015 CDR L2
RTSNLAS

SEQ ID NO: 2830 - protein, 9 aa, synthetic construct
  REGION 1..9: note = Ab1015 CDR L3
QQWSGYPYT

SEQ ID NO: 2831 - protein, 215 aa, synthetic construct; identical to SEQ ID NO: 516
  REGION 1..215: note = Ab1016 LC

SEQ ID NO: 2832 - protein, 446 aa, synthetic construct
  REGION 1..446: note = Ab1016 HC
EVQLVESGGGLVQPGGSLRLSCAASGFTFSNYYMNWVRQAPGKGLEWVAQIRVKSENFATHYADSVKGRFTISRDDSKSTVYLQMNSLRAEDTAVYYCTLYDGFSWGQGTLVTVSSASTKGPSVFPLAPSSKSTSGGTAALGCLVKDYFPEPVTVSWNSGALTSGVHTFPAVLQSSGLYSLSSVVTVPSSSLGTQTYICNVNHKPSNTKVDKKVEPKSCDKTHTCPPCPAPEAAGGPSVFLFPPKPKDTLMISRTPEVTCVVVDVSHEDPEVKFNWYVDGVEVHNAKTKPREEQYNSTYRVVSVLTVLHQDWLNGKEYKCKVSNKALGAPIEKTISKAKGQPREPQVYTLPPSRDELTKNQVSLTCLVKGFYPSDIAVEWESNGQPENNYKTTPPVLDSDGSFFLYSKLTVDKSRWQQGNVFSCSVMHEALHNHYTQKSLSLSPGK

SEQ ID NO: 2833 - protein, 5 aa, synthetic construct
  REGION 1..5: note = Ab1016 CDR H1
NYYMN

SEQ ID NO: 2834 - protein, 19 aa, synthetic construct
  REGION 1..19: note = Ab1016 CDR H2
QIRVKSENFATHYADSVKG

SEQ ID NO: 2835 - protein, 5 aa, synthetic construct
  REGION 1..5: note = Ab1016 CDR H3
YDGFS

SEQ ID NO: 2836 - protein, 12 aa, synthetic construct
  REGION 1..12: note = Ab1016 CDR L1
SASSSVSSGNFH

SEQ ID NO: 2837 - protein, 7 aa, synthetic construct
  REGION 1..7: note = Ab1016 CDR L2
RTSNLAS

SEQ ID NO: 2838 - protein, 9 aa, synthetic construct
  REGION 1..9: note = Ab1016 CDR L3
QQWSGYPYT

SEQ ID NO: 2839 - protein, 215 aa, synthetic construct; identical to SEQ ID NO: 516
  REGION 1..215: note = Ab1017 LC

SEQ ID NO: 2840 - protein, 446 aa, synthetic construct
  REGION 1..446: note = Ab1017 HC
EVQLVESGGGLVQPGGSLRLSCAASGFTFSNYWMSWVRQAPGKGLEWVAQIRVKSENFATHYADSVKGRFTISRDDSKSTVYLQMNSLRAEDTAVYYCTLYDGFSWGQGTLVTVSSASTKGPSVFPLAPSSKSTSGGTAALGCLVKDYFPEPVTVSWNSGALTSGVHTFPAVLQSSGLYSLSSVVTVPSSSLGTQTYICNVNHKPSNTKVDKKVEPKSCDKTHTCPPCPAPEAAGGPSVFLFPPKPKDTLMISRTPEVTCVVVDVSHEDPEVKFNWYVDGVEVHNAKTKPREEQYNSTYRVVSVLTVLHQDWLNGKEYKCKVSNKALGAPIEKTISKAKGQPREPQVYTLPPSRDELTKNQVSLTCLVKGFYPSDIAVEWESNGQPENNYKTTPPVLDSDGSFFLYSKLTVDKSRWQQGNVFSCSVMHEALHNHYTQKSLSLSPGK

SEQ ID NO: 2841 - protein, 5 aa, synthetic construct
  REGION 1..5: note = Ab1017 CDR H1
NYWMS

SEQ ID NO: 2842 - protein, 19 aa, synthetic construct
  REGION 1..19: note = Ab1017 CDR H2
QIRVKSENFATHYADSVKG

SEQ ID NO: 2843 - protein, 5 aa, synthetic construct
  REGION 1..5: note = Ab1017 CDR H3
YDGFS

SEQ ID NO: 2844 - protein, 12 aa, synthetic construct
  REGION 1..12: note = Ab1017 CDR L1
SASSSVSSGNFH

SEQ ID NO: 2845 - protein, 7 aa, synthetic construct
  REGION 1..7: note = Ab1017 CDR L2
RTSNLAS

SEQ ID NO: 2846 - protein, 9 aa, synthetic construct
  REGION 1..9: note = Ab1017 CDR L3
QQWSGYPYT

SEQ ID NO: 2847 - protein, 215 aa, synthetic construct; identical to SEQ ID NO: 516
  REGION 1..215: note = Ab1018 LC

SEQ ID NO: 2848 - protein, 446 aa, synthetic construct
  REGION 1..446: note = Ab1018 HC
EVQLVESGGGLVQPGGSLRLSCAASGFTFSNYWMNWVRQAPGKGLEWVAQIRVKSENFATHYADSVKGRFTISRDDSKSTVYLQMNSLRAEDTAVYYCTLYEGFSWGQGTLVTVSSASTKGPSVFPLAPSSKSTSGGTAALGCLVKDYFPEPVTVSWNSGALTSGVHTFPAVLQSSGLYSLSSVVTVPSSSLGTQTYICNVNHKPSNTKVDKKVEPKSCDKTHTCPPCPAPEAAGGPSVFLFPPKPKDTLMISRTPEVTCVVVDVSHEDPEVKFNWYVDGVEVHNAKTKPREEQYNSTYRVVSVLTVLHQDWLNGKEYKCKVSNKALGAPIEKTISKAKGQPREPQVYTLPPSRDELTKNQVSLTCLVKGFYPSDIAVEWESNGQPENNYKTTPPVLDSDGSFFLYSKLTVDKSRWQQGNVFSCSVMHEALHNHYTQKSLSLSPGK

SEQ ID NO: 2849 - protein, 5 aa, synthetic construct
  REGION 1..5: note = Ab1018 CDR H1
NYWMN

SEQ ID NO: 2850 - protein, 19 aa, synthetic construct
  REGION 1..19: note = Ab1018 CDR H2
QIRVKSENFATHYADSVKG

SEQ ID NO: 2851 - protein, 5 aa, synthetic construct
  REGION 1..5: note = Ab1018 CDR H3
YEGFS

SEQ ID NO: 2852 - protein, 12 aa, synthetic construct
  REGION 1..12: note = Ab1018 CDR L1
SASSSVSSGNFH

SEQ ID NO: 2853 - protein, 7 aa, synthetic construct
  REGION 1..7: note = Ab1018 CDR L2
RTSNLAS

SEQ ID NO: 2854 - protein, 9 aa, synthetic construct
  REGION 1..9: note = Ab1018 CDR L3
QQWSGYPYT

SEQ ID NO: 2855 - protein, 215 aa, synthetic construct; identical to SEQ ID NO: 516
  REGION 1..215: note = Ab1019 LC

SEQ ID NO: 2856 - protein, 446 aa, synthetic construct
  REGION 1..446: note = Ab1019 HC
EVQLVESGGGLVQPGGSLRLSCAASGFTFSNYWMNWVRQAPGKGLEWVAQIRVKSENFATHYADSVKGRFTISRDDSKSTVYLQMNSLRAEDTAVYYCTLYDAFSWGQGTLVTVSSASTKGPSVFPLAPSSKSTSGGTAALGCLVKDYFPEPVTVSWNSGALTSGVHTFPAVLQSSGLYSLSSVVTVPSSSLGTQTYICNVNHKPSNTKVDKKVEPKSCDKTHTCPPCPAPEAAGGPSVFLFPPKPKDTLMISRTPEVTCVVVDVSHEDPEVKFNWYVDGVEVHNAKTKPREEQYNSTYRVVSVLTVLHQDWLNGKEYKCKVSNKALGAPIEKTISKAKGQPREPQVYTLPPSRDELTKNQVSLTCLVKGFYPSDIAVEWESNGQPENNYKTTPPVLDSDGSFFLYSKLTVDKSRWQQGNVFSCSVMHEALHNHYTQKSLSLSPGK

SEQ ID NO: 2857 - protein, 5 aa, synthetic construct
  REGION 1..5: note = Ab1019 CDR H1
NYWMN

SEQ ID NO: 2858 - protein, 19 aa, synthetic construct
  REGION 1..19: note = Ab1019 CDR H2
QIRVKSENFATHYADSVKG

SEQ ID NO: 2859 - protein, 5 aa, synthetic construct
  REGION 1..5: note = Ab1019 CDR H3
YDAFS

SEQ ID NO: 2860 - protein, 12 aa, synthetic construct
  REGION 1..12: note = Ab1019 CDR L1
SASSSVSSGNFH

SEQ ID NO: 2861 - protein, 7 aa, synthetic construct
  REGION 1..7: note = Ab1019 CDR L2
RTSNLAS

SEQ ID NO: 2862 - protein, 9 aa, synthetic construct
  REGION 1..9: note = Ab1019 CDR L3
QQWSGYPYT

SEQ ID NO: 2863 - protein, 215 aa, synthetic construct; identical to SEQ ID NO: 516
  REGION 1..215: note = Ab1020 LC

SEQ ID NO: 2864 - protein, 446 aa, synthetic construct
  REGION 1..446: note = Ab1020 HC
EVQLVESGGGLVQPGGSLRLSCAASGFTFSNYWMHWVRQAPGKGLEWVAQIRVKSENFATHYADSVKGRFTISRDDSKSTVYLQMNSLRAEDTAVYYCTLYDGFSWGQGTLVTVSSASTKGPSVFPLAPSSKSTSGGTAALGCLVKDYFPEPVTVSWNSGALTSGVHTFPAVLQSSGLYSLSSVVTVPSSSLGTQTYICNVNHKPSNTKVDKKVEPKSCDKTHTCPPCPAPEAAGGPSVFLFPPKPKDTLMISRTPEVTCVVVDVSHEDPEVKFNWYVDGVEVHNAKTKPREEQYNSTYRVVSVLTVLHQDWLNGKEYKCKVSNKALGAPIEKTISKAKGQPREPQVYTLPPSRDELTKNQVSLTCLVKGFYPSDIAVEWESNGQPENNYKTTPPVLDSDGSFFLYSKLTVDKSRWQQGNVFSCSVMHEALHNHYTQKSLSLSPGK

SEQ ID NO: 2865 - protein, 5 aa, synthetic construct
  REGION 1..5: note = Ab1020 CDR H1
NYWMH

SEQ ID NO: 2866 - protein, 19 aa, synthetic construct
  REGION 1..19: note = Ab1020 CDR H2
QIRVKSENFATHYADSVKG

SEQ ID NO: 2867 - protein, 5 aa, synthetic construct
  REGION 1..5: note = Ab1020 CDR H3
YDGFS

SEQ ID NO: 2868 - protein, 12 aa, synthetic construct
  REGION 1..12: note = Ab1020 CDR L1
SASSSVSSGNFH

SEQ ID NO: 2869 - protein, 7 aa, synthetic construct
  REGION 1..7: note = Ab1020 CDR L2
RTSNLAS

SEQ ID NO: 2870 - protein, 9 aa, synthetic construct
  REGION 1..9: note = Ab1020 CDR L3
QQWSGYPYT

SEQ ID NO: 2871 - protein, 215 aa, synthetic construct; identical to SEQ ID NO: 516
  REGION 1..215: note = Ab1021 LC

SEQ ID NO: 2872 - protein, 446 aa, synthetic construct
  REGION 1..446: note = Ab1021 HC
EVQLVESGGGLVQPGGSLRLSCAASGFTFSNYWMNWVRQSPGKGLEWVAQIRVKSENFATHYADSVKGRFTISRDDSKSTVYLQMNSLRAEDTAVYYCTLYDGFSWGQGTLVTVSSASTKGPSVFPLAPSSKSTSGGTAALGCLVKDYFPEPVTVSWNSGALTSGVHTFPAVLQSSGLYSLSSVVTVPSSSLGTQTYICNVNHKPSNTKVDKKVEPKSCDKTHTCPPCPAPEAAGGPSVFLFPPKPKDTLMISRTPEVTCVVVDVSHEDPEVKFNWYVDGVEVHNAKTKPREEQYNSTYRVVSVLTVLHQDWLNGKEYKCKVSNKALGAPIEKTISKAKGQPREPQVYTLPPSRDELTKNQVSLTCLVKGFYPSDIAVEWESNGQPENNYKTTPPVLDSDGSFFLYSKLTVDKSRWQQGNVFSCSVMHEALHNHYTQKSLSLSPGK

SEQ ID NO: 2873 - protein, 5 aa, synthetic construct
  REGION 1..5: note = Ab1021 CDR H1
NYWMN

SEQ ID NO: 2874 - protein, 19 aa, synthetic construct
  REGION 1..19: note = Ab1021 CDR H2
QIRVKSENFATHYADSVKG

SEQ ID NO: 2875 - protein, 5 aa, synthetic construct
  REGION 1..5: note = Ab1021 CDR H3
YDGFS

SEQ ID NO: 2876 - protein, 12 aa, synthetic construct
  REGION 1..12: note = Ab1021 CDR L1
SASSSVSSGNFH

SEQ ID NO: 2877 - protein, 7 aa, synthetic construct
  REGION 1..7: note = Ab1021 CDR L2
RTSNLAS

SEQ ID NO: 2878 - protein, 9 aa, synthetic construct
  REGION 1..9: note = Ab1021 CDR L3
QQWSGYPYT

SEQ ID NO: 2879 - protein, 215 aa, synthetic construct; identical to SEQ ID NO: 516
  REGION 1..215: note = Ab1022 LC

SEQ ID NO: 2880 - protein, 446 aa, synthetic construct
  REGION 1..446: note = Ab1022 HC
EVQLVESGGGLVQPGGSLRLSCAASGFTFSNYWMNWVRQHPGKGLEWVAQIRVKSENFATHYADSVKGRFTISRDDSKSTVYLQMNSLRAEDTAVYYCTLYDGFSWGQGTLVTVSSASTKGPSVFPLAPSSKSTSGGTAALGCLVKDYFPEPVTVSWNSGALTSGVHTFPAVLQSSGLYSLSSVVTVPSSSLGTQTYICNVNHKPSNTKVDKKVEPKSCDKTHTCPPCPAPEAAGGPSVFLFPPKPKDTLMISRTPEVTCVVVDVSHEDPEVKFNWYVDGVEVHNAKTKPREEQYNSTYRVVSVLTVLHQDWLNGKEYKCKVSNKALGAPIEKTISKAKGQPREPQVYTLPPSRDELTKNQVSLTCLVKGFYPSDIAVEWESNGQPENNYKTTPPVLDSDGSFFLYSKLTVDKSRWQQGNVFSCSVMHEALHNHYTQKSLSLSPGK

SEQ ID NO: 2881 - protein, 5 aa, synthetic construct
  REGION 1..5: note = Ab1022 CDR H1
NYWMN

SEQ ID NO: 2882 - protein, 19 aa, synthetic construct
  REGION 1..19: note = Ab1022 CDR H2
QIRVKSENFATHYADSVKG

SEQ ID NO: 2883 - protein, 5 aa, synthetic construct
  REGION 1..5: note = Ab1022 CDR H3
YDGFS

SEQ ID NO: 2884 - protein, 12 aa, synthetic construct
  REGION 1..12: note = Ab1022 CDR L1
SASSSVSSGNFH

SEQ ID NO: 2885 - protein, 7 aa, synthetic construct
  REGION 1..7: note = Ab1022 CDR L2
RTSNLAS

SEQ ID NO: 2886 - protein, 9 aa, synthetic construct
  REGION 1..9: note = Ab1022 CDR L3
QQWSGYPYT

SEQ ID NO: 2887 - protein, 215 aa, synthetic construct; identical to SEQ ID NO: 516
  REGION 1..215: note = Ab1023 LC

SEQ ID NO: 2888 - protein, 446 aa, synthetic construct
  REGION 1..446: note = Ab1023 HC
EVQLVESGGGLVQPGGSLRLSCAASGFTFSNYWMNWVRQAPGKGLEWVAQIRVKYENFATHYADSVKGRFTISRDDSKSTVYLQMNSLRAEDTAVYYCTLYDGFSWGQGTLVTVSSASTKGPSVFPLAPSSKSTSGGTAALGCLVKDYFPEPVTVSWNSGALTSGVHTFPAVLQSSGLYSLSSVVTVPSSSLGTQTYICNVNHKPSNTKVDKKVEPKSCDKTHTCPPCPAPEAAGGPSVFLFPPKPKDTLMISRTPEVTCVVVDVSHEDPEVKFNWYVDGVEVHNAKTKPREEQYNSTYRVVSVLTVLHQDWLNGKEYKCKVSNKALGAPIEKTISKAKGQPREPQVYTLPPSRDELTKNQVSLTCLVKGFYPSDIAVEWESNGQPENNYKTTPPVLDSDGSFFLYSKLTVDKSRWQQGNVFSCSVMHEALHNHYTQKSLSLSPGK

SEQ ID NO: 2889 - protein, 5 aa, synthetic construct
  REGION 1..5: note = Ab1023 CDR H1
NYWMN

SEQ ID NO: 2890 - protein, 19 aa, synthetic construct
  REGION 1..19: note = Ab1023 CDR H2
QIRVKYENFATHYADSVKG

SEQ ID NO: 2891 - protein, 5 aa, synthetic construct
  REGION 1..5: note = Ab1023 CDR H3
YDGFS

SEQ ID NO: 2892 - protein, 12 aa, synthetic construct
  REGION 1..12: note = Ab1023 CDR L1
SASSSVSSGNFH

SEQ ID NO: 2893 - protein, 7 aa, synthetic construct
  REGION 1..7: note = Ab1023 CDR L2
RTSNLAS

SEQ ID NO: 2894 - protein, 9 aa, synthetic construct
  REGION 1..9: note = Ab1023 CDR L3
QQWSGYPYT

SEQ ID NO: 2895 - protein, 215 aa, synthetic construct; identical to SEQ ID NO: 516
  REGION 1..215: note = Ab1024 LC

SEQ ID NO: 2896 - protein, 446 aa, synthetic construct
  REGION 1..446: note = Ab1024 HC
EVQLVESGGGLVQPGGSLRLSCAASGFTFSNYWMNWVRQAPGKGLEWVAQIRVKSENFATHYVDSVKGRFTISRDDSKSTVYLQMNSLRAEDTAVYYCTLYDGFSWGQGTLVTVSSASTKGPSVFPLAPSSKSTSGGTAALGCLVKDYFPEPVTVSWNSGALTSGVHTFPAVLQSSGLYSLSSVVTVPSSSLGTQTYICNVNHKPSNTKVDKKVEPKSCDKTHTCPPCPAPEAAGGPSVFLFPPKPKDTLMISRTPEVTCVVVDVSHEDPEVKFNWYVDGVEVHNAKTKPREEQYNSTYRVVSVLTVLHQDWLNGKEYKCKVSNKALGAPIEKTISKAKGQPREPQVYTLPPSRDELTKNQVSLTCLVKGFYPSDIAVEWESNGQPENNYKTTPPVLDSDGSFFLYSKLTVDKSRWQQGNVFSCSVMHEALHNHYTQKSLSLSPGK

SEQ ID NO: 2897 - protein, 5 aa, synthetic construct
  REGION 1..5: note = Ab1024 CDR H1
NYWMN

SEQ ID NO: 2898 - protein, 19 aa, synthetic construct
  REGION 1..19: note = Ab1024 CDR H2
QIRVKSENFATHYVDSVKG

SEQ ID NO: 2899 - protein, 5 aa, synthetic construct
  REGION 1..5: note = Ab1024 CDR H3
YDGFS

SEQ ID NO: 2900 - protein, 12 aa, synthetic construct
  REGION 1..12: note = Ab1024 CDR L1
SASSSVSSGNFH

SEQ ID NO: 2901 - protein, 7 aa, synthetic construct
  REGION 1..7: note = Ab1024 CDR L2
RTSNLAS

SEQ ID NO: 2902 - protein, 9 aa, synthetic construct
  REGION 1..9: note = Ab1024 CDR L3
QQWSGYPYT

SEQ ID NO: 2903 - protein, 215 aa, synthetic construct; identical to SEQ ID NO: 516
  REGION 1..215: note = Ab1025 LC

SEQ ID NO: 2904 - protein, 446 aa, synthetic construct
  REGION 1..446: note = Ab1025 HC
EVQLVESGGGLVQPGGSLRLSCAASGFTFSNYWMNWVRQAPGKGLEWVAQIRVKSENFATHYADSVKGRFTISRDDSKSTVYLQMNSLRAEDTAVYYCTLYDGFYWGQGTLVTVSSASTKGPSVFPLAPSSKSTSGGTAALGCLVKDYFPEPVTVSWNSGALTSGVHTFPAVLQSSGLYSLSSVVTVPSSSLGTQTYICNVNHKPSNTKVDKKVEPKSCDKTHTCPPCPAPEAAGGPSVFLFPPKPKDTLMISRTPEVTCVVVDVSHEDPEVKFNWYVDGVEVHNAKTKPREEQYNSTYRVVSVLTVLHQDWLNGKEYKCKVSNKALGAPIEKTISKAKGQPREPQVYTLPPSRDELTKNQVSLTCLVKGFYPSDIAVEWESNGQPENNYKTTPPVLDSDGSFFLYSKLTVDKSRWQQGNVFSCSVMHEALHNHYTQKSLSLSPGK

SEQ ID NO: 2905 - protein, 5 aa, synthetic construct
  REGION 1..5: note = Ab1025 CDR H1
NYWMN

SEQ ID NO: 2906 - protein, 19 aa, synthetic construct
  REGION 1..19: note = Ab1025 CDR H2
QIRVKSENFATHYADSVKG

SEQ ID NO: 2907 - protein, 5 aa, synthetic construct
  REGION 1..5: note = Ab1025 CDR H3
YDGFY

SEQ ID NO: 2908 - protein, 12 aa, synthetic construct
  REGION 1..12: note = Ab1025 CDR L1
SASSSVSSGNFH

SEQ ID NO: 2909 - protein, 7 aa, synthetic construct
  REGION 1..7: note = Ab1025 CDR L2
RTSNLAS

SEQ ID NO: 2910 - protein, 9 aa, synthetic construct
  REGION 1..9: note = Ab1025 CDR L3
QQWSGYPYT

SEQ ID NO: 2911 - protein, 215 aa, synthetic construct; identical to SEQ ID NO: 507
  REGION 1..215: note = Ab1026 LC

SEQ ID NO: 2912 - protein, 446 aa, synthetic construct; identical to SEQ ID NO: 2592
  REGION 1..446: note = Ab1026 HC

SEQ ID NO: 2913 - protein, 5 aa, synthetic construct
  REGION 1..5: note = Ab1026 CDR H1
NYWMN

SEQ ID NO: 2914 - protein, 19 aa, synthetic construct
  REGION 1..19: note = Ab1026 CDR H2
QIRVKSENFATHYADSVKG

SEQ ID NO: 2915 - protein, 5 aa, synthetic construct
  REGION 1..5: note = Ab1026 CDR H3
YDGFS

SEQ ID NO: 2916 - protein, 12 aa, synthetic construct
  REGION 1..12: note = Ab1026 CDR L1
SASSSVSSGNFH

SEQ ID NO: 2917 - protein, 7 aa, synthetic construct
  REGION 1..7: note = Ab1026 CDR L2
RTSNLAS

SEQ ID NO: 2918 - protein, 9 aa, synthetic construct
  REGION 1..9: note = Ab1026 CDR L3
QQASGYPYT

SEQ ID NO: 2919 - protein, 215 aa, synthetic construct
  REGION 1..215: note = Ab1027 LC
DIQMTQSPSSLSASVGDRVTITCSASSSVSSGNFHWYQQKPGKAPKLLIYRTSNLASGVPSRFSGSGSGTDYTLTISSLQPEDFATYYCQQFSGYPYTFGQGTKVEIKRTVAAPSVFIFPPSDEQLKSGTASVVCLLNNFYPREAKVQWKVDNALQSGNSQESVTEQDSKDSTYSLSSTLTLSKADYEKHKVYACEVTHQGLSSPVTKSFNRGEC

SEQ ID NO: 2920 - protein, 446 aa, synthetic construct; identical to SEQ ID NO: 2592
  REGION 1..446: note = Ab1027 HC

SEQ ID NO: 2921 - protein, 5 aa, synthetic construct
  REGION 1..5: note = Ab1027 CDR H1
NYWMN

SEQ ID NO: 2922 - protein, 19 aa, synthetic construct
  REGION 1..19: note = Ab1027 CDR H2
QIRVKSENFATHYADSVKG

SEQ ID NO: 2923 - protein, 5 aa, synthetic construct
  REGION 1..5: note = Ab1027 CDR H3
YDGFS

SEQ ID NO: 2924 - protein, 12 aa, synthetic construct
  REGION 1..12: note = Ab1027 CDR L1
SASSSVSSGNFH

SEQ ID NO: 2925 - protein, 7 aa, synthetic construct
  REGION 1..7: note = Ab1027 CDR L2
RTSNLAS

SEQ ID NO: 2926 - protein, 9 aa, synthetic construct
  REGION 1..9: note = Ab1027 CDR L3
QQFSGYPYT

SEQ ID NO: 2927 - protein, 215 aa, synthetic construct
  REGION 1..215: note = Ab1028 LC
DIQMTQSPSSLSASVGDRVTITCSASSSVSSGNFHWYQQKPGKAPKLLIYRTSNLASGVPSRFSGSGSGTDYTLTISSLQPEDFATYYCQQHSGYPYTFGQGTKVEIKRTVAAPSVFIFPPSDEQLKSGTASVVCLLNNFYPREAKVQWKVDNALQSGNSQESVTEQDSKDSTYSLSSTLTLSKADYEKHKVYACEVTHQGLSSPVTKSFNRGEC

SEQ ID NO: 2928 - protein, 446 aa, synthetic construct; identical to SEQ ID NO: 2592
  REGION 1..446: note = Ab1028 HC

SEQ ID NO: 2929 - protein, 5 aa, synthetic construct
  REGION 1..5: note = Ab1028 CDR H1
NYWMN

SEQ ID NO: 2930 - protein, 19 aa, synthetic construct
  REGION 1..19: note = Ab1028 CDR H2
QIRVKSENFATHYADSVKG

SEQ ID NO: 2931 - protein, 5 aa, synthetic construct
  REGION 1..5: note = Ab1028 CDR H3
YDGFS

SEQ ID NO: 2932 - protein, 12 aa, synthetic construct
  REGION 1..12: note = Ab1028 CDR L1
SASSSVSSGNFH

SEQ ID NO: 2933 - protein, 7 aa, synthetic construct
  REGION 1..7: note = Ab1028 CDR L2
RTSNLAS

SEQ ID NO: 2934 - protein, 9 aa, synthetic construct
  REGION 1..9: note = Ab1028 CDR L3
QQHSGYPYT

SEQ ID NO: 2935 - protein, 215 aa, synthetic construct
  REGION 1..215: note = Ab1029 LC
DIQMTQSPSSLSASVGDRVTITCSASSSVSSGNFHWYQQKPGKAPKLLIYRTSNLASGVPSRFSGSGSGTDYTLTISSLQPEDFATYYCQQYSGYPYTFGQGTKVEIKRTVAAPSVFIFPPSDEQLKSGTASVVCLLNNFYPREAKVQWKVDNALQSGNSQESVTEQDSKDSTYSLSSTLTLSKADYEKHKVYACEVTHQGLSSPVTKSFNRGEC

SEQ ID NO: 2936 - protein, 446 aa, synthetic construct; identical to SEQ ID NO: 2592
  REGION 1..446: note = Ab1029 HC

SEQ ID NO: 2937 - protein, 5 aa, synthetic construct
  REGION 1..5: note = Ab1029 CDR H1
NYWMN

SEQ ID NO: 2938 - protein, 19 aa, synthetic construct
  REGION 1..19: note = Ab1029 CDR H2
QIRVKSENFATHYADSVKG

SEQ ID NO: 2939 - protein, 5 aa, synthetic construct
  REGION 1..5: note = Ab1029 CDR H3
YDGFS

SEQ ID NO: 2940 - protein, 12 aa, synthetic construct
  REGION 1..12: note = Ab1029 CDR L1
SASSSVSSGNFH

SEQ ID NO: 2941 - protein, 7 aa, synthetic construct
  REGION 1..7: note = Ab1029 CDR L2
RTSNLAS

SEQ ID NO: 2942 - protein, 9 aa, synthetic construct
  REGION 1..9: note = Ab1029 CDR L3
QQYSGYPYT

SEQ ID NO: 2943 - protein, 215 aa, synthetic construct
  REGION 1..215: note = Ab1030 LC
DIQMTQSPSSLSASVGDRVTITCSASSSVSSGNFHWYQQKPGKSPKLLIYRTSNLASGVPSRFSGSGSGTDYTLTISSLQPEDFATYYCQQWSGYPYTFGQGTKVEIKRTVAAPSVFIFPPSDEQLKSGTASVVCLLNNFYPREAKVQWKVDNALQSGNSQESVTEQDSKDSTYSLSSTLTLSKADYEKHKVYACEVTHQGLSSPVTKSFNRGEC

SEQ ID NO: 2944 - protein, 446 aa, synthetic construct; identical to SEQ ID NO: 2592
  REGION 1..446: note = Ab1030 HC

SEQ ID NO: 2945 - protein, 5 aa, synthetic construct
  REGION 1..5: note = Ab1030 CDR H1
NYWMN

SEQ ID NO: 2946 - protein, 19 aa, synthetic construct
  REGION 1..19: note = Ab1030 CDR H2
QIRVKSENFATHYADSVKG

SEQ ID NO: 2947 - protein, 5 aa, synthetic construct
  REGION 1..5: note = Ab1030 CDR H3
YDGFS

SEQ ID NO: 2948 - protein, 12 aa, synthetic construct
  REGION 1..12: note = Ab1030 CDR L1
SASSSVSSGNFH

SEQ ID NO: 2949 - protein, 7 aa, synthetic construct
  REGION 1..7: note = Ab1030 CDR L2
RTSNLAS

SEQ ID NO: 2950 - protein, 9 aa, synthetic construct
  REGION 1..9: note = Ab1030 CDR L3
QQWSGYPYT

SEQ ID NO: 2951 - protein, 215 aa, synthetic construct
  REGION 1..215: note = Ab1031 LC
DIQMTQSPSSLSASVGDRVTITCSASSSVSSGNFHWYQQKPGKAPKLLIYRTSNLASGVPSRFSGSGSGTDYTLTIQSLQPEDFATYYCQQWSGYPYTFGQGTKVEIKRTVAAPSVFIFPPSDEQLKSGTASVVCLLNNFYPREAKVQWKVDNALQSGNSQESVTEQDSKDSTYSLSSTLTLSKADYEKHKVYACEVTHQGLSSPVTKSFNRGEC

SEQ ID NO: 2952 - protein, 446 aa, synthetic construct; identical to SEQ ID NO: 2592
  REGION 1..446: note = Ab1031 HC

SEQ ID NO: 2953 - protein, 5 aa, synthetic construct
  REGION 1..5: note = Ab1031 CDR H1
NYWMN

SEQ ID NO: 2954 - protein, 19 aa, synthetic construct
  REGION 1..19: note = Ab1031 CDR H2
QIRVKSENFATHYADSVKG

SEQ ID NO: 2955 - protein, 5 aa, synthetic construct
  REGION 1..5: note = Ab1031 CDR H3
YDGFS

SEQ ID NO: 2956 - protein, 12 aa, synthetic construct
  REGION 1..12: note = Ab1031 CDR L1
SASSSVSSGNFH

SEQ ID NO: 2957 - protein, 7 aa, synthetic construct
  REGION 1..7: note = Ab1031 CDR L2
RTSNLAS

SEQ ID NO: 2958 - protein, 9 aa, synthetic construct
  REGION 1..9: note = Ab1031 CDR L3
QQWSGYPYT

SEQ ID NO: 2959 - protein, 215 aa, synthetic construct; identical to SEQ ID NO: 507
  REGION 1..215: note = Ab1065 LC

SEQ ID NO: 2960 - protein, 446 aa, synthetic construct; identical to SEQ ID NO: 2848
  REGION 1..446: note = Ab1065 HC

SEQ ID NO: 2961 - protein, 5 aa, synthetic construct
  REGION 1..5: note = Ab1065 CDR H1
NYWMN

SEQ ID NO: 2962 - protein, 19 aa, synthetic construct
  REGION 1..19: note = Ab1065 CDR H2
QIRVKSENFATHYADSVKG

SEQ ID NO: 2963 - protein, 5 aa, synthetic construct
  REGION 1..5: note = Ab1065 CDR H3
YEGFS

SEQ ID NO: 2964 - protein, 12 aa, synthetic construct
  REGION 1..12: note = Ab1065 CDR L1
SASSSVSSGNFH

SEQ ID NO: 2965 - protein, 7 aa, synthetic construct
  REGION 1..7: note = Ab1065 CDR L2
RTSNLAS

SEQ ID NO: 2966 - protein, 9 aa, synthetic construct
  REGION 1..9: note = Ab1065 CDR L3
QQASGYPYT

SEQ ID NO: 2967 - protein, 215 aa, synthetic construct; identical to SEQ ID NO: 507
  REGION 1..215: note = Ab1066 LC

SEQ ID NO: 2968 - protein, 446 aa, synthetic construct; identical to SEQ ID NO: 2856
  REGION 1..446: note = Ab1066 HC

SEQ ID NO: 2969 - protein, 5 aa, synthetic construct
  REGION 1..5: note = Ab1066 CDR H1
NYWMN

SEQ ID NO: 2970 - protein, 19 aa, synthetic construct
  REGION 1..19: note = Ab1066 CDR H2
QIRVKSENFATHYADSVKG

SEQ ID NO: 2971 - protein, 5 aa, synthetic construct
  REGION 1..5: note = Ab1066 CDR H3
YDAFS

SEQ ID NO: 2972 - protein, 12 aa, synthetic construct
  REGION 1..12: note = Ab1066 CDR L1
SASSSVSSGNFH

SEQ ID NO: 2973 - protein, 7 aa, synthetic construct
  REGION 1..7: note = Ab1066 CDR L2
RTSNLAS

SEQ ID NO: 2974 - protein, 9 aa, synthetic construct
  REGION 1..9: note = Ab1066 CDR L3
QQASGYPYT

SEQ ID NO: 2975 - protein, 215 aa, synthetic construct; identical to SEQ ID NO: 516
  REGION 1..215: note = Ab1069 Hole LC

SEQ ID NO: 2976 - protein, 446 aa, synthetic construct
  REGION 1..446: note = Ab1069 Hole HC
EVQLVESGGGLVQPGGSLRLSCAASGFTFSNYWMNWVRQAPGKGLEWVAQIRVKSENFATHYADSVKGRFTISRDDSKSTVYLQMNSLRAEDTAVYYCTLYDGFSWGQGTLVTVSSASTKGPSVFPLAPSSKSTSGGTAALGCLVKDYFPEPVTVSWNSGALTSGVHTFPAVLQSSGLYSLSSVVTVPSSSLGTQTYICNVNHKPSNTKVDKKVEPKSCDKTHTCPPCPAPEAAGGPSVFLFPPKPKDTLMISRTPEVTCVVVDVSHEDPEVKFNWYVDGVEVHNAKTKPREEQYNSTYRVVSVLTVLHQDWLNGKEYKCKVSNKALGAPIEKTISKAKGQPREPQVYTLPPIRELMTSNQVSLSCAVKGFYPSDIAVEWESNGQPENNYKTTPPVLDSDGSFFLVSKLTVDKSRWQQGNVFSCSVMHEALHNHYTQKSLSLSPGK

SEQ ID NO: 2977 - protein, 478 aa, synthetic construct
  REGION 1..478: note = Ab1069 Knob KC
QVQLVQSGAEVKKPGASVKVSCKASGYTFTSYWMHWVRQHPGQGLEWMGMIHPNSGGTNYAQKFQGRVTMTRDTSTSTVYMELSSLRSEDTAVYYCAMGDYVSRDYWGQGTLVTVSSGGGGSGGGGSGGGGSEIVLTQSPGTLSLSPGERATLSCRASSSVSSSYLHWYQQKPGQAPRLLIYSTSSRATGIPDRFSGSGSGTDFTLTISRLEPEDFAVYYCQQYSGYQFTFGQGTKLEIKGGGGSDKTHTCPPCPAPEAAGGPSVFLFPPKPKDTLMISRTPEVTCVVVDVSHEDPEVKFNWYVDGVEVHNAKTKPREEQYNSTYRVVSVLTVLHQDWLNGKEYKCKVSNKALGAPIEKTISKAKGQPREPMVFDLPPSREEMTKNQVSLWCMVKGFYPSDIAVEWESNGQPENNYKTTPPVLDSDGSFFLYSKLTVDKSRWQQGNVFSCSVMHEALHNHYTQKSLSLSPGKHHHHHH

SEQ ID NO: 2978 - protein, 5 aa, synthetic construct
  REGION 1..5: note = Ab1069 CDR H1
NYWMN

SEQ ID NO: 2979 - protein, 19 aa, synthetic construct
  REGION 1..19: note = Ab1069 CDR H2
QIRVKSENFATHYADSVKG

SEQ ID NO: 2980 - protein, 5 aa, synthetic construct
  REGION 1..5: note = Ab1069 CDR H3
YDGFS

SEQ ID NO: 2981 - protein, 12 aa, synthetic construct
  REGION 1..12: note = Ab1069 CDR L1
SASSSVSSGNFH

SEQ ID NO: 2982 - protein, 7 aa, synthetic construct
  REGION 1..7: note = Ab1069 CDR L2
RTSNLAS

SEQ ID NO: 2983 - protein, 9 aa, synthetic construct
  REGION 1..9: note = Ab1069 CDR L3
QQWSGYPYT

SEQ ID NO: 2984 - protein, 215 aa, synthetic construct; identical to SEQ ID NO: 516
  REGION 1..215: note = Ab1088 Hole LC

SEQ ID NO: 2985 - protein, 445 aa, synthetic construct
  REGION 1..445: note = Ab1088 Hole HC
EVQLVESGGGLVQPGGSLRLSCAASGFTFSNYWMNWVRQAPGKGLEWVAQIRVKSENFATHYADSVKGRFTISRDDSKSTVYLQMNSLRAEDTAVYYCTLYDAFSWGQGTLVTVSSASTKGPSVFPLAPSSKSTSGGTAALGCLVKDYFPEPVTVSWNSGALTSGVHTFPAVLQSSGLYSLSSVVTVPSSSLGTQTYICNVNHKPSNTKVDKKVEPKSCDKTHTCPPCPAPEAAGGPSVFLFPPKPKDTLMISRTPEVTCVVVDVSHEDPEVKFNWYVDGVEVHNAKTKPREEQYNSTYRVVSVLTVLHQDWLNGKEYKCKVSNKALPAPIEKTISKAKGQPREPQVYTLPPSRDELTKNQVSLSCAVKGFYPSDIAVEWESNGQPENNYKTTPPVLDSDGSFFLVSKLTVDKSRWQQGNVFSCSVMHEALHNHYTQKSLSLSPG

SEQ ID NO: 2986 - protein, 471 aa, synthetic construct
  REGION 1..471: note = Ab1088 Knob KC
QVQLVQSGAEVKKPGASVKVSCKASGYTFTSYWMHWVRQHPGQGLEWMGMIHPNSGGTNYAQKFQGRVTMTRDTSTSTVYMELSSLRSEDTAVYYCAMGDYVSRDYWGQGTLVTVSSGGGGSGGGGSGGGGSEIVLTQSPGTLSLSPGERATLSCRASSSVSSSYLHWYQQKPGQAPRLLIYSTSSRATGIPDRFSGSGSGTDFTLTISRLEPEDFAVYYCQQYSGYQFTFGQGTKLEIKGGGGSDKTHTCPPCPAPEAAGGPSVFLFPPKPKDTLMISRTPEVTCVVVDVSHEDPEVKFNWYVDGVEVHNAKTKPREEQYNSTYRVVSVLTVLHQDWLNGKEYKCKVSNKALPAPIEKTISKAKGQPREPQVYTLPPSRDELTKNQVSLWCLVKGFYPSDIAVEWESNGQPENNYKTTPPVLDSDGSFFLYSKLTVDKSRWQQGNVFSCSVMHEALHNHYTQKSLSLSPG

SEQ ID NO: 2987 - protein, 5 aa, synthetic construct
  REGION 1..5: note = Ab1088 CDR H1
NYWMN

SEQ ID NO: 2988 - protein, 19 aa, synthetic construct
  REGION 1..19: note = Ab1088 CDR H2
QIRVKSENFATHYADSVKG

SEQ ID NO: 2989 - protein, 5 aa, synthetic construct
  REGION 1..5: note = Ab1088 CDR H3
YDAFS

SEQ ID NO: 2990 - protein, 12 aa, synthetic construct
  REGION 1..12: note = Ab1088 CDR L1
SASSSVSSGNFH

SEQ ID NO: 2991 - protein, 7 aa, synthetic construct
  REGION 1..7: note = Ab1088 CDR L2
RTSNLAS

SEQ ID NO: 2992 - protein, 9 aa, synthetic construct
  REGION 1..9: note = Ab1088 CDR L3
QQWSGYPYT

SEQ ID NO: 2993 - protein, 215 aa, synthetic construct; identical to SEQ ID NO: 516
  REGION 1..215: note = Ab1089 Hole LC

SEQ ID NO: 2994 - protein, 445 aa, synthetic construct
  REGION 1..445: note = Ab1089 Hole HC
EVQLVESGGGLVQPGGSLRLSCAASGFTFSNYWMNWVRQAPGKGLEWVAQIRVKSENFATHYVDSVKGRFTISRDDSKSTVYLQMNSLRAEDTAVYYCTLYDAFSWGQGTLVTVSSASTKGPSVFPLAPSSKSTSGGTAALGCLVKDYFPEPVTVSWNSGALTSGVHTFPAVLQSSGLYSLSSVVTVPSSSLGTQTYICNVNHKPSNTKVDKKVEPKSCDKTHTCPPCPAPEAAGGPSVFLFPPKPKDTLMISRTPEVTCVVVDVSHEDPEVKFNWYVDGVEVHNAKTKPREEQYNSTYRVVSVLTVLHQDWLNGKEYKCKVSNKALPAPIEKTISKAKGQPREPQVYTLPPSRDELTKNQVSLSCAVKGFYPSDIAVEWESNGQPENNYKTTPPVLDSDGSFFLVSKLTVDKSRWQQGNVFSCSVMHEALHNHYTQKSLSLSPG

SEQ ID NO: 2995 - protein, 471 aa, synthetic construct; identical to SEQ ID NO: 2986
  REGION 1..471: note = Ab1089 Knob KC

SEQ ID NO: 2996 - protein, 5 aa, synthetic construct
  REGION 1..5: note = Ab1089 CDR H1
NYWMN

SEQ ID NO: 2997 - protein, 19 aa, synthetic construct
  REGION 1..19: note = Ab1089 CDR H2
QIRVKSENFATHYVDSVKG

SEQ ID NO: 2998 - protein, 5 aa, synthetic construct
  REGION 1..5: note = Ab1089 CDR L1
YDAFS

SEQ ID NO: 2999 - protein, 12 aa, synthetic construct
  REGION 1..12: note = Ab1089 CDR L1
SASSSVSSGNFH

SEQ ID NO: 3000 - protein, 7 aa, synthetic construct
  REGION 1..7: note = Ab1089 CDR L2
RTSNLAS

SEQ ID NO: 3001 - protein, 9 aa, synthetic construct
  REGION 1..9: note = Ab1089 CDR L3
QQWSGYPYT

SEQ ID NO: 3002 - protein, 215 aa, synthetic construct; identical to SEQ ID NO: 507
  REGION 1..215: note = Ab1090 Hole LC

SEQ ID NO: 3003 - protein, 445 aa, synthetic construct
  REGION 1..445: note = Ab1090 Hole HC
EVQLVESGGGLVQPGGSLRLSCAASGFTFSNYWMNWVRQAPGKGLEWVAQIRVKSENFATHYVDSVKGRFTISRDDSKSTVYLQMNSLRAEDTAVYYCTLYDGFSWGQGTLVTVSSASTKGPSVFPLAPSSKSTSGGTAALGCLVKDYFPEPVTVSWNSGALTSGVHTFPAVLQSSGLYSLSSVVTVPSSSLGTQTYICNVNHKPSNTKVDKKVEPKSCDKTHTCPPCPAPEAAGGPSVFLFPPKPKDTLMISRTPEVTCVVVDVSHEDPEVKFNWYVDGVEVHNAKTKPREEQYNSTYRVVSVLTVLHQDWLNGKEYKCKVSNKALPAPIEKTISKAKGQPREPQVYTLPPSRDELTKNQVSLSCAVKGFYPSDIAVEWESNGQPENNYKTTPPVLDSDGSFFLVSKLTVDKSRWQQGNVFSCSVMHEALHNHYTQKSLSLSPG

SEQ ID NO: 3004 - protein, 471 aa, synthetic construct; identical to SEQ ID NO: 2986
  REGION 1..471: note = Ab1090 Knob KC

SEQ ID NO: 3005 - protein, 5 aa, synthetic construct
  REGION 1..5: note = Ab1090 CDR H1
NYWMN

SEQ ID NO: 3006 - protein, 19 aa, synthetic construct
  REGION 1..19: note = Ab1090 CDR H2
QIRVKSENFATHYVDSVKG

SEQ ID NO: 3007 - protein, 5 aa, synthetic construct
  REGION 1..5: note = Ab1090 CDR H3
YDGFS

SEQ ID NO: 3008 - protein, 12 aa, synthetic construct
  REGION 1..12: note = Ab1090 CDR L1
SASSSVSSGNFH

SEQ ID NO: 3009 - protein, 7 aa, synthetic construct
  REGION 1..7: note = Ab1090 CDR L2
RTSNLAS

SEQ ID NO: 3010 - protein, 9 aa, synthetic construct
  REGION 1..9: note = Ab1090 CDR L3
QQASGYPYT

SEQ ID NO: 3011 - protein, 472 aa, synthetic construct; identical to SEQ ID NO: 8
  REGION 1..472: note = Ab0382 Hole HC

SEQ ID NO: 3012 - protein, 487 aa, synthetic construct
  REGION 1..487: note = Ab0382 Knob HC
EVQLVESGGGLVQPKGSLKLSCAASGFTFNTYAMNWVRQAPGKGLEWVARIRSKYNNYATYYADSVKDRFTISRDDSQSILYLQMNNLKTEDTAMYYCVRHGNFGNSYVSWFAYWGQGTLVTVSAGGGGSGGGGSGGGGSQAVVTQESALTTSPGETVTLTCRSSTGAVTTSNYANWVQEKPDHLFTGLIGGTNKRAPGVPARFSGSLIGDKAALTITGAQTEDEAIYFCALWYSNLWVFGGGTKLTVLGGGGSDKTHTCPPCPAPEAAGGPSVFLFPPKPKDTLMISRTPEVTCVVVDVSHEDPEVKFNWYVDGVEVHNAKTKPREEQYNSTYRVVSVLTVLHQDWLNGKEYKCKVSNKALGAPIEKTISKAKGQPREPMVFDLPPSREEMTKNQVSLWCMVKGFYPSDIAVEWESNGQPENNYKTTPPVLDSDGSFFLYSKLTVDKSRWQQGNVFSCSVMHEALHNHYTQKSLSLSPGKHHHHHH

SEQ ID NO: 3013 - protein, 215 aa, synthetic construct; identical to SEQ ID NO: 15
  REGION 1..215: note = Ab0383 Hole LC

SEQ ID NO: 3014 - protein, 447 aa, synthetic construct; identical to SEQ ID NO: 16
  REGION 1..447: note = Ab0383 Hole HC

SEQ ID NO: 3015 - protein, 487 aa, synthetic construct; identical to SEQ ID NO: 3012
  REGION 1..487: note = Ab0383 Knob HC

SEQ ID NO: 3016 - protein, 481 aa, synthetic construct; identical to SEQ ID NO: 2232
  REGION 1..481: note = Ab0432 Hole HC

SEQ ID NO: 3017 - protein, 478 aa, synthetic construct
  REGION 1..478: note = Ab0432 Knob HC
QVQLVQSGAEVKKPGASVKVSCKASGYTFTSYWMHWVRQAPGQGLEWMGIIHPNSGGTSYAQKFQGRVTMTRDTSTSTVYMELSSLRSEDTAVYYCAMGDYVSRDYWGQGTLVTVSSGGGGSGGGGSGGGGSEIVLTQSPGTLSLSPGERATLSCRASSSVSSSYLHWYQQKPGQAPRLLIYSTSSRATGIPDRFSGSGSGTDFTLTISRLEPEDFAVYYCQQYSGYLFTFGQGTKLEIKGGGGSDKTHTCPPCPAPEAAGGPSVFLFPPKPKDTLMISRTPEVTCVVVDVSHEDPEVKFNWYVDGVEVHNAKTKPREEQYNSTYRVVSVLTVLHQDWLNGKEYKCKVSNKALGAPIEKTISKAKGQPREPMVFDLPPSREEMTKNQVSLWCMVKGFYPSDIAVEWESNGQPENNYKTTPPVLDSDGSFFLYSKLTVDKSRWQQGNVFSCSVMHEALHNHYTQKSLSLSPGKHHHHHH

SEQ ID NO: 3018 - protein, 481 aa, synthetic construct; identical to SEQ ID NO: 2232
  REGION 1..481: note = Ab0644 Hole HC

SEQ ID NO: 3019 - protein, 214 aa, synthetic construct; identical to SEQ ID NO: 857
  REGION 1..214: note = Ab0644 Knob LC

SEQ ID NO: 3020 - protein, 463 aa, synthetic construct
  REGION 1..463: note = Ab0644 Knob HC
EVQLVESGGGLVQPGGSLRLSCAASGFDVSSYSIHWVRQAPGKGLEWVASISPYYGSTYYADSVKGRFTISADTSKNTAYLQMNSLRAEDTAVYYCARYYEWYKYSLYMGSMGFDYWGQGTLVTVSSASTKGPSVFPLAPSSKSTSGGTAALGCLVKDYFPEPVTVSWNSGALTSGVHTFPAVLQSSGLYSLSSVVTVPSSSLGTQTYICNVNHKPSNTKVDKKVEPKSCDKTHTCPPCPAPEAAGGPSVFLFPPKPKDTLMISRTPEVTCVVVDVSHEDPEVKFNWYVDGVEVHNAKTKPREEQYNSTYRVVSVLTVLHQDWLNGKEYKCKVSNKALGAPIEKTISKAKGQPREPMVFDLPPSREEMTKNQVSLWCMVKGFYPSDIAVEWESNGQPENNYKTTPPVLDSDGSFFLYSKLTVDKSRWQQGNVFSCSVMHEALHNHYTQKSLSLSPGKHHHHHH

SEQ ID NO: 3021 - protein, 481 aa, synthetic construct; identical to SEQ ID NO: 2232
  REGION 1..481: note = Ab0649 Hole HC

SEQ ID NO: 3022 - protein, 214 aa, synthetic construct; identical to SEQ ID NO: 857
  REGION 1..214: note = Ab0649 Knob LC

SEQ ID NO: 3023 - protein, 705 aa, synthetic construct
  REGION 1..705: note = Ab0649 Knob HC
EVQLVESGGGLVQPGGSLRLSCAASGFDVSSYSIHWVRQAPGKGLEWVASISPYYGSTYYADSVKGRFTISADTSKNTAYLQMNSLRAEDTAVYYCARYYEWYKYSLYMGSMGFDYWGQGTLVTVSSASTKGPSVFPLAPSSKSTSGGTAALGCLVKDYFPEPVTVSWNSGALTSGVHTFPAVLQSSGLYSLSSVVTVPSSSLGTQTYICNVNHKPSNTKVDKKVEPKSCDKTHTGGGGSGGEVQLVESGGGLVQPGGSLRLSCAASGFDVSSYSIHWVRQAPGKGLEWVASISPYYGSTYYADSVKGRFTISADTSKNTAYLQMNSLRAEDTAVYYCARYYEWYKYSLYMGSMGFDYWGQGTLVTVSSASTKGPSVFPLAPSSKSTSGGTAALGCLVKDYFPEPVTVSWNSGALTSGVHTFPAVLQSSGLYSLSSVVTVPSSSLGTQTYICNVNHKPSNTKVDKKVEPKSCDKTHTCPPCPAPEAAGGPSVFLFPPKPKDTLMISRTPEVTCVVVDVSHEDPEVKFNWYVDGVEVHNAKTKPREEQYNSTYRVVSVLTVLHQDWLNGKEYKCKVSNKALGAPIEKTISKAKGQPREPMVFDLPPSREEMTKNQVSLWCMVKGFYPSDIAVEWESNGQPENNYKTTPPVLDSDGSFFLYSKLTVDKSRWQQGNVFSCSVMHEALHNHYTQKSLSLSPGKHHHHHH

SEQ ID NO: 3024 - protein, 481 aa, synthetic construct; identical to SEQ ID NO: 1752
  REGION 1..481: note = Ab0684 Hole HC

SEQ ID NO: 3025 - protein, 214 aa, synthetic construct; identical to SEQ ID NO: 857
  REGION 1..214: note = Ab0684 Knob LC

SEQ ID NO: 3026 - protein, 705 aa, synthetic construct; identical to SEQ ID NO: 3023
  REGION 1..705: note = Ab0684 Knob HC

SEQ ID NO: 3027 - protein, 482 aa, synthetic construct; identical to SEQ ID NO: 2040
  REGION 1..482: note = Ab0685 Hole HC

SEQ ID NO: 3028 - protein, 214 aa, synthetic construct; identical to SEQ ID NO: 857
  REGION 1..214: note = Knob LC

SEQ ID NO: 3029 - protein, 705 aa, synthetic construct; identical to SEQ ID NO: 3023
  REGION 1..705: note = Ab0685 Knob HC

SEQ ID NO: 3030 - protein, 482 aa, synthetic construct; identical to SEQ ID NO: 2184
  REGION 1..482: note = Ab0686 Hole HC

SEQ ID NO: 3031 - protein, 214 aa, synthetic construct; identical to SEQ ID NO: 857
  REGION 1..214: note = Ab0686 Knob LC

SEQ ID NO: 3032 - protein, 705 aa, synthetic construct; identical to SEQ ID NO: 3023
  REGION 1..705: note = Ab0686 Knob HC

SEQ ID NO: 3033 - protein, 482 aa, synthetic construct; identical to SEQ ID NO: 2184
  REGION 1..482: note = Ab0779 Hole HC

SEQ ID NO: 3034 - protein, 214 aa, synthetic construct; identical to SEQ ID NO: 857
  REGION 1..214: note = Ab0779 Knob LC

SEQ ID NO: 3035 - protein, 705 aa, synthetic construct
  REGION 1..705: note = Ab0779 Knob HC
EVQLVESGGGLVQPGGSLRLSCAASGFDFSSYSIHWVRQAPGKGLEWVASISPYYGSTYYADSVKGRFTISADTSKNTAYLQMNSLRAEDTAVYYCARYYEWYKYDLYLGSLGFDYWGQGTLVTVSSASTKGPSVFPLAPSSKSTSGGTAALGCLVKDYFPEPVTVSWNSGALTSGVHTFPAVLQSSGLYSLSSVVTVPSSSLGTQTYICNVNHKPSNTKVDKKVEPKSCDKTHTGGGGSGGEVQLVESGGGLVQPGGSLRLSCAASGFDFSSYSIHWVRQAPGKGLEWVASISPYYGSTYYADSVKGRFTISADTSKNTAYLQMNSLRAEDTAVYYCARYYEWYKYDLYLGSLGFDYWGQGTLVTVSSASTKGPSVFPLAPSSKSTSGGTAALGCLVKDYFPEPVTVSWNSGALTSGVHTFPAVLQSSGLYSLSSVVTVPSSSLGTQTYICNVNHKPSNTKVDKKVEPKSCDKTHTCPPCPAPEAAGGPSVFLFPPKPKDTLMISRTPEVTCVVVDVSHEDPEVKFNWYVDGVEVHNAKTKPREEQYNSTYRVVSVLTVLHQDWLNGKEYKCKVSNKALGAPIEKTISKAKGQPREPMVFDLPPSREEMTKNQVSLWCMVKGFYPSDIAVEWESNGQPENNYKTTPPVLDSDGSFFLYSKLTVDKSRWQQGNVFSCSVMHEALHNHYTQKSLSLSPGKHHHHHH

SEQ ID NO: 3036 - protein, 482 aa, synthetic construct
  REGION 1..482: note = Ab0904 Hole HC
EVQLVESGGGLVQPGGSLRLSCAASGFTFNTYAMNWVRQAPGKGLEWVARIRSKYNNYATYYADSVKGRFTISRDDSKSILYLQMNSLRAEDTAVYYCVRHGNFGNSYVSWFAYWGQGTLVTVSSGGGGSGGGGSGGGGSDIQVTQSPSSLSASVGDRVTITCRSSTGAVTTSNYANWVQQKPGKAFKGLIGGTNKLAPGVPSRFSGSLSGDDATLTISSLQPEDFATYYCALWYSNLWVFGQGTKLEIKGGGGSDKTHTCPPCPAPEAAGGPSVFLFPPKPKDTLMISRTPEVTCVVVDVSHEDPEVKFNWYVDGVEVHNAKTKPREEQYNSTYRVVSVLTVLHQDWLNGKEYKCKVSNKALGAPIEKTISKAKGQPREPQVYTLPPIRELMTSNQVSLSCAVKGFYPSDIAVEWESNGQPENNYKTTPPVLDSDGSFFLVSKLTVDKSRWQQGNVFSCSVMHEALHNHYTQKSLSLSPGK

SEQ ID NO: 3037 - protein, 214 aa, synthetic construct; identical to SEQ ID NO: 857
  REGION 1..214: note = Ab0904 Knob LC

SEQ ID NO: 3038 - protein, 705 aa, synthetic construct; identical to SEQ ID NO: 3035
  REGION 1..705: note = Ab0904 Knob HC

SEQ ID NO: 3039 - protein, 482 aa, synthetic construct
  REGION 1..482: note = Ab0905 Hole HC
EVQLVESGGGLVQPGGSLRLSCAASGFTFNTYAMNWVRQAPGKGLEWVARIRSKYNNYATYYADSVKGRFTISRDDSKSILYLQMNSLRAEDTAVYYCVRHGNFGNSYVSWFAYWGQGTLVTVSSGGGGSGGGGSGGGGSDIQVTQSPSSLSASVGDRVTITCRSSTGAVTTSNYANWVQQKPGKAFKGLIGGTNKRAPGVPSRFSGSLSGDDATLTISSLQPEDFATYYCALWYSNLWVFGQGTKLEIKGGGGSDKTHTCPPCPAPEAAGGPSVFLFPPKPKDTLMISRTPEVTCVVVDVSHEDPEVKFNWYVDGVEVHNAKTKPREEQYNSTYRVVSVLTVLHQDWLNGKEYKCKVSNKALGAPIEKTISKAKGQPREPQVYTLPPIRELMTSNQVSLSCAVKGFYPSDIAVEWESNGQPENNYKTTPPVLDSDGSFFLVSKLTVDKSRWQQGNVFSCSVMHEALHNHYTQKSLSLSPGK

SEQ ID NO: 3040 - protein, 214 aa, synthetic construct; identical to SEQ ID NO: 857
  REGION 1..214: note = Ab0905 Knob LC

SEQ ID NO: 3041 - protein, 705 aa, synthetic construct; identical to SEQ ID NO: 3035
  REGION 1..705: note = Ab0905 Knob HC

SEQ ID NO: 3042 - protein, 482 aa, synthetic construct
  REGION 1..482: note = Ab0906 Hole HC
EVQLVESGGGLVQPGGSLRLSCAASGFTFNTYAMNWVRQAPGKGLEWVGRIRSKYNNYATYYADSVKGRFTISRDDSKSILYLQMNSLRAEDTAVYYCVRHGNFGNSYVSWFAYWGQGTLVTVSSGGGGSGGGGSGGGGSDIQVTQSPSSLSASVGDRVTITCRSSTGAVTTSNYANWVQQKPGKAFKGLIGGTNKRAPGVPSRFSGSLSGDDATLTISSLQPEDFATYYCALWYSNLWVFGQGTKLEIKGGGGSDKTHTCPPCPAPEAAGGPSVFLFPPKPKDTLMISRTPEVTCVVVDVSHEDPEVKFNWYVDGVEVHNAKTKPREEQYNSTYRVVSVLTVLHQDWLNGKEYKCKVSNKALGAPIEKTISKAKGQPREPQVYTLPPIRELMTSNQVSLSCAVKGFYPSDIAVEWESNGQPENNYKTTPPVLDSDGSFFLVSKLTVDKSRWQQGNVFSCSVMHEALHNHYTQKSLSLSPGK

SEQ ID NO: 3043 - protein, 214 aa, synthetic construct; identical to SEQ ID NO: 857
  REGION 1..214: note = Ab0906 Knob LC

SEQ ID NO: 3044 - protein, 705 aa, synthetic construct; identical to SEQ ID NO: 3035
  REGION 1..705: note = Ab0906 Knob HC

SEQ ID NO: 3045 - protein, 214 aa, synthetic construct; identical to SEQ ID NO: 857
  REGION 1..214: note = Ab1060 Hole LC

SEQ ID NO: 3046 - protein, 699 aa, synthetic construct
  REGION 1..699: note = Ab1060 Hole HC
EVQLVESGGGLVQPGGSLRLSCAASGFDFSSYSIHWVRQAPGKGLEWVASISPYYGSTYYADSVKGRFTISADTSKNTAYLQMNSLRAEDTAVYYCARYYEWYKYDLYAGSLGFDYWGQGTLVTVSSASTKGPSVFPLAPSSKSTSGGTAALGCLVKDYFPEPVTVSWNSGALTSGVHTFPAVLQSSGLYSLSSVVTVPSSSLGTQTYICNVNHKPSNTKVDKKVEPKSCDKTHTGGGGSGGEVQLVESGGGLVQPGGSLRLSCAASGFDFSSYSIHWVRQAPGKGLEWVASISPYYGSTYYADSVKGRFTISADTSKNTAYLQMNSLRAEDTAVYYCARYYEWYKYDLYAGSLGFDYWGQGTLVTVSSASTKGPSVFPLAPSSKSTSGGTAALGCLVKDYFPEPVTVSWNSGALTSGVHTFPAVLQSSGLYSLSSVVTVPSSSLGTQTYICNVNHKPSNTKVDKKVEPKSCDKTHTCPPCPAPEAAGGPSVFLFPPKPKDTLMISRTPEVTCVVVDVSHEDPEVKFNWYVDGVEVHNAKTKPREEQYNSTYRVVSVLTVLHQDWLNGKEYKCKVSNKALPAPIEKTISKAKGQPREPQVYTLPPSRDELTKNQVSLSCAVKGFYPSDIAVEWESNGQPENNYKTTPPVLDSDGSFFLVSKLTVDKSRWQQGNVFSCSVMHEALHNHYTQKSLSLSPGK

SEQ ID NO: 3047 - protein, 482 aa, synthetic construct
  REGION 1..482: note = Ab1060 Knob HC
EVQLVESGGGLVQPGGSLRLSCAASGFTFNTYAMNWVRQAPGKGLEWVARIRSKYNNYATYYADSVKGRFTISRDDSKSILYLQMNSLRAEDTAVYYCVRHGNFGNSYVSWFAYWGQGTLVTVSSGGGGSGGGGSGGGGSDIQVTQSPSSLSASVGDRVTITCRSSTGAVTTSNYANWVQQKPGKAFKGLIGGTNKLAPGVPSRFSGSLSGDDATLTISSLQPEDFATYYCALWYSNLWVFGQGTKLEIKGGGGSDKTHTCPPCPAPEAAGGPSVFLFPPKPKDTLMISRTPEVTCVVVDVSHEDPEVKFNWYVDGVEVHNAKTKPREEQYNSTYRVVSVLTVLHQDWLNGKEYKCKVSNKALPAPIEKTISKAKGQPREPQVYTLPPSRDELTKNQVSLWCLVKGFYPSDIAVEWESNGQPENNYKTTPPVLDSDGSFFLYSKLTVDKSRWQQGNVFSCSVMHEALHNHYTQKSLSLSPGK

SEQ ID NO: 3048 - protein, 482 aa, synthetic construct; identical to SEQ ID NO: 3036
  REGION 1..482: note = Ab1063 Hole HC

SEQ ID NO: 3049 - protein, 214 aa, synthetic construct; identical to SEQ ID NO: 857
  REGION 1..214: note = Ab1063 Knob LC

SEQ ID NO: 3050 - protein, 705 aa, synthetic construct
  REGION 1..705: note = Ab1063 Knob HC
EVQLVESGGGLVQPGGSLRLSCAASGFDFSSYSIHWVRQAPGKGLEWVAAISPYYGSTYYADSVKGRFTISADTSKNTAYLQMNSLRAEDTAVYYCARYYEWYKYDLYAGSLGFDYWGQGTLVTVSSASTKGPSVFPLAPSSKSTSGGTAALGCLVKDYFPEPVTVSWNSGALTSGVHTFPAVLQSSGLYSLSSVVTVPSSSLGTQTYICNVNHKPSNTKVDKKVEPKSCDKTHTGGGGSGGEVQLVESGGGLVQPGGSLRLSCAASGFDFSSYSIHWVRQAPGKGLEWVAAISPYYGSTYYADSVKGRFTISADTSKNTAYLQMNSLRAEDTAVYYCARYYEWYKYDLYAGSLGFDYWGQGTLVTVSSASTKGPSVFPLAPSSKSTSGGTAALGCLVKDYFPEPVTVSWNSGALTSGVHTFPAVLQSSGLYSLSSVVTVPSSSLGTQTYICNVNHKPSNTKVDKKVEPKSCDKTHTCPPCPAPEAAGGPSVFLFPPKPKDTLMISRTPEVTCVVVDVSHEDPEVKFNWYVDGVEVHNAKTKPREEQYNSTYRVVSVLTVLHQDWLNGKEYKCKVSNKALGAPIEKTISKAKGQPREPMVFDLPPSREEMTKNQVSLWCMVKGFYPSDIAVEWESNGQPENNYKTTPPVLDSDGSFFLYSKLTVDKSRWQQGNVFSCSVMHEALHNHYTQKSLSLSPGKHHHHHH

SEQ ID NO: 3051 - protein, 482 aa, synthetic construct; identical to SEQ ID NO: 3036
  REGION 1..482: note = Ab1064 Hole HC

SEQ ID NO: 3052 - protein, 214 aa, synthetic construct; identical to SEQ ID NO: 857
  REGION 1..214: note = Ab1064 Knob LC

SEQ ID NO: 3053 - protein, 705 aa, synthetic construct
  REGION 1..705: note = Ab1064 Knob HC
EVQLVESGGGLVQPGGSLRLSCAASGFDFSSYSIHWVRQAPGKGLEWVAAISPYYGSTYYADSVKGRFTISADTSKNTAYLQMNSLRAEDTAVYYCARYYEYYKYDLYAGSLGFDYWGQGTLVTVSSASTKGPSVFPLAPSSKSTSGGTAALGCLVKDYFPEPVTVSWNSGALTSGVHTFPAVLQSSGLYSLSSVVTVPSSSLGTQTYICNVNHKPSNTKVDKKVEPKSCDKTHTGGGGSGGEVQLVESGGGLVQPGGSLRLSCAASGFDFSSYSIHWVRQAPGKGLEWVAAISPYYGSTYYADSVKGRFTISADTSKNTAYLQMNSLRAEDTAVYYCARYYEYYKYDLYAGSLGFDYWGQGTLVTVSSASTKGPSVFPLAPSSKSTSGGTAALGCLVKDYFPEPVTVSWNSGALTSGVHTFPAVLQSSGLYSLSSVVTVPSSSLGTQTYICNVNHKPSNTKVDKKVEPKSCDKTHTCPPCPAPEAAGGPSVFLFPPKPKDTLMISRTPEVTCVVVDVSHEDPEVKFNWYVDGVEVHNAKTKPREEQYNSTYRVVSVLTVLHQDWLNGKEYKCKVSNKALGAPIEKTISKAKGQPREPMVFDLPPSREEMTKNQVSLWCMVKGFYPSDIAVEWESNGQPENNYKTTPPVLDSDGSFFLYSKLTVDKSRWQQGNVFSCSVMHEALHNHYTQKSLSLSPGKHHHHHH

SEQ ID NO: 3054 - protein, 214 aa, synthetic construct; identical to SEQ ID NO: 857
  REGION 1..214: note = Ab1091 Hole LC

SEQ ID NO: 3055 - protein, 698 aa, synthetic construct; identical to SEQ ID NO: 2472
  REGION 1..698: note = Ab1091 Hole HC

SEQ ID NO: 3056 - protein, 481 aa, synthetic construct; identical to SEQ ID NO: 2473
  REGION 1..481: note = Ab1091 Knob HC

SEQ ID NO: 3057 - protein, 214 aa, synthetic construct; identical to SEQ ID NO: 857
  REGION 1..214: note = Ab1133 Hole LC

SEQ ID NO: 3058 - protein, 698 aa, synthetic construct; identical to SEQ ID NO: 2472
  REGION 1..698: note = Ab1133 Hole HC

SEQ ID NO: 3059 - protein, 481 aa, synthetic construct; identical to SEQ ID NO: 2482
  REGION 1..481: note = Ab1133 Knob HC

SEQ ID NO: 3060 - protein, 214 aa, synthetic construct; identical to SEQ ID NO: 857
  REGION 1..214: note = Ab1134 Hole LC

SEQ ID NO: 3061 - protein, 698 aa, synthetic construct; identical to SEQ ID NO: 2472
  REGION 1..698: note = Ab1134 Hole HC

SEQ ID NO: 3062 - protein, 481 aa, synthetic construct; identical to SEQ ID NO: 2491
  REGION 1..481: note = Ab1134 Knob HC

SEQ ID NO: 3063 - protein, 214 aa, synthetic construct; identical to SEQ ID NO: 857
  REGION 1..214: note = Ab1135 Hole LC

SEQ ID NO: 3064 - protein, 698 aa, synthetic construct; identical to SEQ ID NO: 2472
  REGION 1..698: note = Ab1135 Hole HC

SEQ ID NO: 3065 - protein, 481 aa, synthetic construct; identical to SEQ ID NO: 2500
  REGION 1..481: note = Ab1135 Knob HC

SEQ ID NO: 3066 - protein, 214 aa, synthetic construct; identical to SEQ ID NO: 857
  REGION 1..214: note = Ab1136 Hole LC

SEQ ID NO: 3067 - protein, 697 aa, synthetic construct
  REGION 1..697: note = Ab1136 Hole HC
EVQLVESGGGLVQPGGSLRLSCAASGFDFSSYSIHWVRQAPGKGLEWVAAISPYYGSTYYADSVKGRFTISADTSKNTAYLQMNSLRAEDTAVYYCARYYEYYKYDLYAGSLGFDYWGQGTLVTVSSASTKGPSVFPLAPSSKSTSGGTAALGCLVKDYFPEPVTVSWNSGALTSGVHTFPAVLQSSGLYSLSSVVTVPSSSLGTQTYICNVNHKPSNTKVDKKVEPKSCDKTHTGGGGSGGEVQLVESGGGLVQPGGSLRLSCAASGFDFSSYSIHWVRQAPGKGLEWVAAISPYYGSTYYADSVKGRFTISADTSKNTAYLQMNSLRAEDTAVYYCARYYEYYKYDLYAGSLGFDYWGQGTLVTVSSASTKGPSVFPLAPSSKSTSGGTAALGCLVKDYFPEPVTVSWNSGALTSGVHTFPAVLQSSGLYSLSSVVTVPSSSLGTQTYICNVNHKPSNTKVDKKVEPKSCDKTHTCPPCPAPEAAGGPSVFLFPPKPKDTLMISRTPEVTCVVVDVSHEDPEVKFNWYVDGVEVHNAKTKPREEQYNSTYRVVSVLTVLHQDWLNGKEYKCKVSNKALPAPIEKTISKAKGQPREPQVYTLPPSRDELTKNQVSLSCAVKGFYPSDIAVEWESNGQPENNYKTTPPVLDSDGSFFLVSKLTVDKSRWQQGNVFSCSVMHEALHNHYTQKSLSLSP

SEQ ID NO: 3068 - protein, 481 aa, synthetic construct; identical to SEQ ID NO: 2509
  REGION 1..481: note = Ab1136 Knob HC

SEQ ID NO: 3069 - protein, 214 aa, synthetic construct; identical to SEQ ID NO: 857
  REGION 1..214: note = Ab1137 Hole LC

SEQ ID NO: 3070 - protein, 698 aa, synthetic construct; identical to SEQ ID NO: 2472
  REGION 1..698: note = Ab1137 Hole HC

SEQ ID NO: 3071 - protein, 481 aa, synthetic construct; identical to SEQ ID NO: 2518
  REGION 1..481: note = Ab1137 Knob HC

SEQ ID NO: 3072 - protein, 214 aa, synthetic construct; identical to SEQ ID NO: 857
  REGION 1..214: note = Ab1154 Hole LC

SEQ ID NO: 3073 - protein, 698 aa, synthetic construct; identical to SEQ ID NO: 2472
  REGION 1..698: note = Ab1154 Hole HC

SEQ ID NO: 3074 - protein, 475 aa, synthetic construct
  REGION 1..475: note = Ab1154 Knob HC
DIQMTQSPSSLSASVGDRVTITCRASQDIRNYLNWYQQKPGKAPKLLIYYTSRLESGVPSRFSGSGSGTDYTLTISSLQPEDFATYYCQQGNTLPWTFGQGTKVEIKGGGGSGGGGSGGGGSEVQLVESGGGLVQPGGSLRLSCAASGYSFTGYTMNWVRQAPGKGLEWVALINPYKGVSTYNQKFKDRATLSVDKSKNTAYLQMNSLRAEDTAVYYCARSGYYGDSDWYFDVWGQGTLVTVSSGGGGSDKTHTCPPCPAPEAAGGPSVFLFPPKPKDTLMISRTPEVTCVVVDVSHEDPEVKFNWYVDGVEVHNAKTKPREEQYNSTYRVVSVLTVLHQDWLNGKEYKCKVSNKALPAPIEKTISKAKGQPREPQVYTLPPSRDELTKNQVSLWCLVKGFYPSDIAVEWESNGQPENNYKTTPPVLDSDGSFFLYSKLTVDKSRWQQGNVFSCSVMHEALHNHYTQKSLSLSPG

SEQ ID NO: 3075 - protein, 214 aa, synthetic construct; identical to SEQ ID NO: 857
  REGION 1..214: note = Ab0386 Hole LC

SEQ ID NO: 3076 - protein, 457 aa, synthetic construct; identical to SEQ ID NO: 865
  REGION 1..457: note = Ab0386 Hole HC

SEQ ID NO: 3077 - protein, 481 aa, synthetic construct
  REGION 1..481: note = Ab0386 Knob HC
DIQMTQSPSSLSASVGDRVTITCRSTKSLLHSNGITYLYWYQQKPGKAPKLLIYQMSNLASGVPSRFSSSGSGTDFTLTISSLQPEDFATYYCAQNLEIPRTFGQGTKVELKGGGGSGGGGSGGGGSEVQLVQSGPGLVQPGGSVRISCAASGYTFTNYGMNWVKQAPGKGLEWMGWINTYTGESTYADSFKGRFTFSLDTSASAAYLQINSLRAEDTAVYYCARFAIKGDYWGQGTLLTVSSGGGGSDKTHTCPPCPAPEAAGGPSVFLFPPKPKDTLMISRTPEVTCVVVDVSHEDPEVKFNWYVDGVEVHNAKTKPREEQYNSTYRVVSVLTVLHQDWLNGKEYKCKVSNKALGAPIEKTISKAKGQPREPMVFDLPPSREEMTKNQVSLWCMVKGFYPSDIAVEWESNGQPENNYKTTPPVLDSDGSFFLYSKLTVDKSRWQQGNVFSCSVMHEALHNHYTQKSLSLSPGKHHHHHH

SEQ ID NO: 3078 - protein, 219 aa, synthetic construct
  REGION 1..219: note = Ab0439 Hole LC
DIQMTQSPSSLSASVGDRVTITCRSTKSLLHSNGITYLYWYQQKPGKAPKLLIYQMSNLASGVPSRFSSSGSGTDFTLTISSLQPEDFATYYCAQNLEIPRTFGQGTKVELKRTVAAPSVFIFPPSDEQLKSGTASVVCLLNNFYPREAKVQWKVDNALQSGNSQESVTEQDSKDSTYSLSSTLTLSKADYEKHKVYACEVTHQGLSSPVTKSFNRGEC

SEQ ID NO: 3079 - protein, 451 aa, synthetic construct
  REGION 1..451: note = Ab0439 Hole HC
EVQLVQSGPGLVQPGGSVRISCAASGYTFTNYGMNWVKQAPGKGLEWMGWINTYTGESTYADSFKGRFTFSLDTSASAAYLQINSLRAEDTAVYYCARFAIKGDYWGQGTLLTVSSASTKGPSVFPLAPSSKSTSGGTAALGCLVKDYFPEPVTVSWNSGALTSGVHTFPAVLQSSGLYSLSSVVTVPSSSLGTQTYICNVNHKPSNTKVDKKVEPKSCGGGGSDKTHTCPPCPAPEAAGGPSVFLFPPKPKDTLMISRTPEVTCVVVDVSHEDPEVKFNWYVDGVEVHNAKTKPREEQYNSTYRVVSVLTVLHQDWLNGKEYKCKVSNKALGAPIEKTISKAKGQPREPQVYTLPPIRELMTSNQVSLSCAVKGFYPSDIAVEWESNGQPENNYKTTPPVLDSDGSFFLVSKLTVDKSRWQQGNVFSCSVMHEALHNHYTQKSLSLSPGK

SEQ ID NO: 3080 - protein, 478 aa, synthetic construct; identical to SEQ ID NO: 3017
  REGION 1..478: note = Ab0439 Knob HC

SEQ ID NO: 3081 - protein, 472 aa, synthetic construct; identical to SEQ ID NO: 8
  REGION 1..472: note = Ab0642 Hole HC

SEQ ID NO: 3082 - protein, 219 aa, synthetic construct; identical to SEQ ID NO: 3078
  REGION 1..219: note = Ab0642 Knob LC

SEQ ID NO: 3083 - protein, 452 aa, synthetic construct
  REGION 1..452: note = Ab0642 Knob HC
EVQLVQSGPGLVQPGGSVRISCAASGYTFTNYGMNWVKQAPGKGLEWMGWINTYTGESTYADSFKGRFTFSLDTSASAAYLQINSLRAEDTAVYYCARFAIKGDYWGQGTLLTVSSASTKGPSVFPLAPSSKSTSGGTAALGCLVKDYFPEPVTVSWNSGALTSGVHTFPAVLQSSGLYSLSSVVTVPSSSLGTQTYICNVNHKPSNTKVDKKVEPKSCDKTHTCPPCPAPEAAGGPSVFLFPPKPKDTLMISRTPEVTCVVVDVSHEDPEVKFNWYVDGVEVHNAKTKPREEQYNSTYRVVSVLTVLHQDWLNGKEYKCKVSNKALGAPIEKTISKAKGQPREPMVFDLPPSREEMTKNQVSLWCMVKGFYPSDIAVEWESNGQPENNYKTTPPVLDSDGSFFLYSKLTVDKSRWQQGNVFSCSVMHEALHNHYTQKSLSLSPGKHHHHHH

SEQ ID NO: 3084 - protein, 481 aa, synthetic construct
  REGION 1..481: note = Ab0643 Hole HC
EVQLVESGGGLVQPGGSLRLSCAASGFDVSSYSIHWVRQAPGKGLEWVASISPYYGSTYYADSVKGRFTISADTSKNTAYLQMNSLRAEDTAVYYCARYYEWYKYSLYMGSMGFDYWGQGTLVTVSSGGGGSGGGGSGGGGSDIQMTQSPSSLSASVGDRVTITCRASQSVSSAVAWYQQKPGKAPKLLIYSASSLYSGVPSRFSGSRSGTDFTLTISSLQPEDFATYYCQQGGYSLITFGQGTKVEIKGGGGSDKTHTCPPCPAPEAAGGPSVFLFPPKPKDTLMISRTPEVTCVVVDVSHEDPEVKFNWYVDGVEVHNAKTKPREEQYNSTYRVVSVLTVLHQDWLNGKEYKCKVSNKALGAPIEKTISKAKGQPREPQVYTLPPIRELMTSNQVSLSCAVKGFYPSDIAVEWESNGQPENNYKTTPPVLDSDGSFFLVSKLTVDKSRWQQGNVFSCSVMHEALHNHYTQKSLSLSPGK

SEQ ID NO: 3085 - protein, 219 aa, synthetic construct; identical to SEQ ID NO: 3078
  REGION 1..219: note = Ab0643 Knob LC

SEQ ID NO: 3086 - protein, 452 aa, synthetic construct; identical to SEQ ID NO: 3083
  REGION 1..452: note = Ab0643 Knob HC

SEQ ID NO: 3087 - protein, 219 aa, synthetic construct; identical to SEQ ID NO: 3078
  REGION 1..219: note = Ab0778 Hole LC

SEQ ID NO: 3088 - protein, 446 aa, synthetic construct
  REGION 1..446: note = Ab0778 Hole HC
EVQLVQSGPGLVQPGGSVRISCAASGYTFTNYGMNWVKQAPGKGLEWMGWINTYTGESTYADSFKGRFTFSLDTSASAAYLQINSLRAEDTAVYYCARFAIKGDYWGQGTLLTVSSASTKGPSVFPLAPSSKSTSGGTAALGCLVKDYFPEPVTVSWNSGALTSGVHTFPAVLQSSGLYSLSSVVTVPSSSLGTQTYICNVNHKPSNTKVDKKVEPKSCDKTHTCPPCPAPEAAGGPSVFLFPPKPKDTLMISRTPEVTCVVVDVSHEDPEVKFNWYVDGVEVHNAKTKPREEQYNSTYRVVSVLTVLHQDWLNGKEYKCKVSNKALGAPIEKTISKAKGQPREPQVYTLPPIRELMTSNQVSLSCAVKGFYPSDIAVEWESNGQPENNYKTTPPVLDSDGSFFLVSKLTVDKSRWQQGNVFSCSVMHEALHNHYTQKSLSLSPGK

SEQ ID NO: 3089 - protein, 478 aa, synthetic construct
  REGION 1..478: note = Ab0778 Knob HC
QVQLVQSGAEVKKPGASVKVSCKASGYTFTSYWMHWVRQHPGQGLEWMGIIHPNSGGTSYAQKFQGRVTMTRDTSTSTVYMELSSLRSEDTAVYYCAMGDYVSRDYWGQGTLVTVSSGGGGSGGGGSGGGGSEIVLTQSPGTLSLSPGERATLSCRASSSVSSSYLHWYQQKPGQAPRLLIYSTSSRATGIPDRFSGSGSGTDFTLTISRLEPEDFAVYYCQQYSGYQFTFGQGTKLEIKGGGGSDKTHTCPPCPAPEAAGGPSVFLFPPKPKDTLMISRTPEVTCVVVDVSHEDPEVKFNWYVDGVEVHNAKTKPREEQYNSTYRVVSVLTVLHQDWLNGKEYKCKVSNKALGAPIEKTISKAKGQPREPMVFDLPPSREEMTKNQVSLWCMVKGFYPSDIAVEWESNGQPENNYKTTPPVLDSDGSFFLYSKLTVDKSRWQQGNVFSCSVMHEALHNHYTQKSLSLSPGKHHHHHH

SEQ ID NO: 3090 - protein, 213 aa, synthetic construct; identical to SEQ ID NO: 2759
  REGION 1..213: note = Ab0794 Hole LC

SEQ ID NO: 3091 - protein, 446 aa, synthetic construct
  REGION 1..446: note = Ab0794 Hole HC
QVQLQQSGAELMKPGASVKLSCKATGYTFTGYSIEWIKQRPGHGLEWIGEILPGSGYTNYNEKFKGKATFTADTSSNTAYMQLSSLTTEDSAIYYCARDGPPFAYWGQGTLVTVSAASTKGPSVFPLAPSSKSTSGGTAALGCLVKDYFPEPVTVSWNSGALTSGVHTFPAVLQSSGLYSLSSVVTVPSSSLGTQTYICNVNHKPSNTKVDKKVEPKSCDKTHTCPPCPAPEAAGGPSVFLFPPKPKDTLMISRTPEVTCVVVDVSHEDPEVKFNWYVDGVEVHNAKTKPREEQYNSTYRVVSVLTVLHQDWLNGKEYKCKVSNKALGAPIEKTISKAKGQPREPQVYTLPPIRELMTSNQVSLSCAVKGFYPSDIAVEWESNGQPENNYKTTPPVLDSDGSFFLVSKLTVDKSRWQQGNVFSCSVMHEALHNHYTQKSLSLSPGK

SEQ ID NO: 3092 - protein, 478 aa, synthetic construct; identical to SEQ ID NO: 3017
  REGION 1..478: note = Ab0794 Knob HC

SEQ ID NO: 3093 - protein, 219 aa, synthetic construct; identical to SEQ ID NO: 2743
  REGION 1..219: note = Ab0795 Hole LC

SEQ ID NO: 3094 - protein, 453 aa, synthetic construct
  REGION 1..453: note = Ab0795 Hole HC
QVQLEQSGAELVKPGASVKLSCKASGYTFTEYTIHWVKQRSGQGLEWIGWFYPGNDNIKYNEKFKDRATLTADKSSHTVYLELSRLTSEDSAVFFCARHEDKYFYGSSYFDYWGQGTTLTVSSASTKGPSVFPLAPSSKSTSGGTAALGCLVKDYFPEPVTVSWNSGALTSGVHTFPAVLQSSGLYSLSSVVTVPSSSLGTQTYICNVNHKPSNTKVDKKVEPKSCDKTHTCPPCPAPEAAGGPSVFLFPPKPKDTLMISRTPEVTCVVVDVSHEDPEVKFNWYVDGVEVHNAKTKPREEQYNSTYRVVSVLTVLHQDWLNGKEYKCKVSNKALGAPIEKTISKAKGQPREPQVYTLPPIRELMTSNQVSLSCAVKGFYPSDIAVEWESNGQPENNYKTTPPVLDSDGSFFLVSKLTVDKSRWQQGNVFSCSVMHEALHNHYTQKSLSLSPGK

SEQ ID NO: 3095 - protein, 478 aa, synthetic construct; identical to SEQ ID NO: 3017
  REGION 1..478: note = Ab0795 Knob HC

SEQ ID NO: 3096 - protein, 215 aa, synthetic construct; identical to SEQ ID NO: 2543
  REGION 1..215: note = Ab0796 Hole LC

SEQ ID NO: 3097 - protein, 446 aa, synthetic construct
  REGION 1..446: note = Ab0796 Hole HC
EVKLEESGGGLVQPGGSMKLSCVASGFTFSNYWMNWVRQSPEKGLEWVAQIRVKSENFATHYAESVKGRFTISRDDSKSSVYLQMNNLRAEDTGIYYCTLYDGFSWGQGTTLTVSSASTKGPSVFPLAPSSKSTSGGTAALGCLVKDYFPEPVTVSWNSGALTSGVHTFPAVLQSSGLYSLSSVVTVPSSSLGTQTYICNVNHKPSNTKVDKKVEPKSCDKTHTCPPCPAPEAAGGPSVFLFPPKPKDTLMISRTPEVTCVVVDVSHEDPEVKFNWYVDGVEVHNAKTKPREEQYNSTYRVVSVLTVLHQDWLNGKEYKCKVSNKALGAPIEKTISKAKGQPREPQVYTLPPIRELMTSNQVSLSCAVKGFYPSDIAVEWESNGQPENNYKTTPPVLDSDGSFFLVSKLTVDKSRWQQGNVFSCSVMHEALHNHYTQKSLSLSPGK

SEQ ID NO: 3098 - protein, 478 aa, synthetic construct; identical to SEQ ID NO: 3017
  REGION 1..478: note = Ab0796 Knob HC

SEQ ID NO: 3099 - protein, 215 aa, synthetic construct; identical to SEQ ID NO: 516
  REGION 1..215: note = Ab1059 Hole LC

SEQ ID NO: 3100 - protein, 446 aa, synthetic construct
  REGION 1..446: note = Ab1059 Hole HC
EVQLVESGGGLVQPGGSLRLSCAASGFTFSNYWMNWVRQAPGKGLEWVAQIRVKSENFATHYADSVKGRFTISRDDSKSTVYLQMNSLRAEDTAVYYCTLYDGFSWGQGTLVTVSSASTKGPSVFPLAPSSKSTSGGTAALGCLVKDYFPEPVTVSWNSGALTSGVHTFPAVLQSSGLYSLSSVVTVPSSSLGTQTYICNVNHKPSNTKVDKKVEPKSCDKTHTCPPCPAPEAAGGPSVFLFPPKPKDTLMISRTPEVTCVVVDVSHEDPEVKFNWYVDGVEVHNAKTKPREEQYNSTYRVVSVLTVLHQDWLNGKEYKCKVSNKALPAPIEKTISKAKGQPREPQVYTLPPSRDELTKNQVSLSCAVKGFYPSDIAVEWESNGQPENNYKTTPPVLDSDGSFFLVSKLTVDKSRWQQGNVFSCSVMHEALHNHYTQKSLSLSPGK

SEQ ID NO: 3101 - protein, 471 aa, synthetic construct
  REGION 1..471: note = Ab1059 Knob HC
QVQLVQSGAEVKKPGASVKVSCKASGYTFTSYWMHWVRQHPGQGLEWMGIIHPNSGGTSYAQKFQGRVTMTRDTSTSTVYMELSSLRSEDTAVYYCAMGDYVSRDYWGQGTLVTVSSGGGGSGGGGSGGGGSEIVLTQSPGTLSLSPGERATLSCRASSSVSSSYLHWYQQKPGQAPRLLIYSTSSRATGIPDRFSGSGSGTDFTLTISRLEPEDFAVYYCQQYSGYQFTFGQGTKLEIKGGGGSDKTHTCPPCPAPEAAGGPSVFLFPPKPKDTLMISRTPEVTCVVVDVSHEDPEVKFNWYVDGVEVHNAKTKPREEQYNSTYRVVSVLTVLHQDWLNGKEYKCKVSNKALPAPIEKTISKAKGQPREPQVYTLPPSRDELTKNQVSLWCLVKGFYPSDIAVEWESNGQPENNYKTTPPVLDSDGSFFLYSKLTVDKSRWQQGNVFSCSVMHEALHNHYTQKSLSLSPG

SEQ ID NO: 3102 - protein, 215 aa, synthetic construct; identical to SEQ ID NO: 516
  REGION 1..215: note = Ab1068 Hole LC

SEQ ID NO: 3103 - protein, 446 aa, synthetic construct; identical to SEQ ID NO: 2976
  REGION 1..446: note = Ab1068 Hole HC

SEQ ID NO: 3104 - protein, 478 aa, synthetic construct
  REGION 1..478: note = Ab1068 Knob HC
QVQLVQSGAEVKKPGASVKVSCKASGYTFTSYWMHWVRQHPGQGLEWMGMIHPNSGGTSYAQKFQGRVTMTRDTSTSTVYMELSSLRSEDTAVYYCAMGDYVSRDYWGQGTLVTVSSGGGGSGGGGSGGGGSEIVLTQSPGTLSLSPGERATLSCRASSSVSSSYLHWYQQKPGQAPRLLIYSTSSRATGIPDRFSGSGSGTDFTLTISRLEPEDFAVYYCQQYSGYQFTFGQGTKLEIKGGGGSDKTHTCPPCPAPEAAGGPSVFLFPPKPKDTLMISRTPEVTCVVVDVSHEDPEVKFNWYVDGVEVHNAKTKPREEQYNSTYRVVSVLTVLHQDWLNGKEYKCKVSNKALGAPIEKTISKAKGQPREPMVFDLPPSREEMTKNQVSLWCMVKGFYPSDIAVEWESNGQPENNYKTTPPVLDSDGSFFLYSKLTVDKSRWQQGNVFSCSVMHEALHNHYTQKSLSLSPGKHHHHHH

SEQ ID NO: 3105 - protein, 215 aa, synthetic construct; identical to SEQ ID NO: 516
  REGION 1..215: note = Ab1069 Hole LC

SEQ ID NO: 3106 - protein, 446 aa, synthetic construct; identical to SEQ ID NO: 2976
  REGION 1..446: note = Ab1069 Hole HC

SEQ ID NO: 3107 - protein, 478 aa, synthetic construct; identical to SEQ ID NO: 2977
  REGION 1..478: note = Ab1069 Knob HC

SEQ ID NO: 3108 - protein, 215 aa, synthetic construct; identical to SEQ ID NO: 516
  REGION 1..215: note = Ab1088 Hole LC

SEQ ID NO: 3109 - protein, 445 aa, synthetic construct; identical to SEQ ID NO: 2985
  REGION 1..445: note = Ab1088 Hole HC

SEQ ID NO: 3110 - protein, 471 aa, synthetic construct; identical to SEQ ID NO: 2986
  REGION 1..471: note = Ab1088 Knob HC

SEQ ID NO: 3111 - protein, 215 aa, synthetic construct; identical to SEQ ID NO: 516
  REGION 1..215: note = Ab1089 Hole LC

SEQ ID NO: 3112 - protein, 445 aa, synthetic construct; identical to SEQ ID NO: 2994
  REGION 1..445: note = Ab1089 Hole HC

SEQ ID NO: 3113 - protein, 471 aa, synthetic construct; identical to SEQ ID NO: 2986
  REGION 1..471: note = Ab1089 Knob HC

SEQ ID NO: 3114 - protein, 215 aa, synthetic construct; identical to SEQ ID NO: 507
  REGION 1..215: note = Ab1090 Hole LC

SEQ ID NO: 3115 - protein, 445 aa, synthetic construct; identical to SEQ ID NO: 3003
  REGION 1..445: note = Ab1090 Hole HC

SEQ ID NO: 3116 - protein, 471 aa, synthetic construct; identical to SEQ ID NO: 2986
  REGION 1..471: note = Ab1090 Knob HC

SEQ ID NO: 3117 - protein, 471 aa, synthetic construct
  REGION 1..471: note = Ab1093 Hole HC
QVQLVQSGAEVKKPGASVKVSCKASGYTFTSYWMHWVRQHPGQGLEWMGIIHPNSGGTSYAQKFQGRVTMTRDTSTSTVYMELSSLRSEDTAVYYCAMGDYVSRDYWGQGTLVTVSSGGGGSGGGGSGGGGSEIVLTQSPGTLSLSPGERATLSCRASSSVSSSYLHWYQQKPGQAPRLLIYSTSSRATGIPDRFSGSGSGTDFTLTISRLEPEDFAVYYCQQYSGYQFTFGQGTKLEIKGGGGSDKTHTCPPCPAPEAAGGPSVFLFPPKPKDTLMISRTPEVTCVVVDVSHEDPEVKFNWYVDGVEVHNAKTKPREEQYNSTYRVVSVLTVLHQDWLNGKEYKCKVSNKALPAPIEKTISKAKGQPREPQVYTLPPSRDELTKNQVSLSCAVKGFYPSDIAVEWESNGQPENNYKTTPPVLDSDGSFFLVSKLTVDKSRWQQGNVFSCSVMHEALHNHYTQKSLSLSPG

SEQ ID NO: 3118 - protein, 215 aa, synthetic construct; identical to SEQ ID NO: 516
  REGION 1..215: note = Ab1093 Knob LC

SEQ ID NO: 3119 - protein, 445 aa, synthetic construct; identical to SEQ ID NO: 517
  REGION 1..445: note = Ab1093 Knob HC

SEQ ID NO: 3120 - protein, 471 aa, synthetic construct; identical to SEQ ID NO: 506
  REGION 1..471: note = Ab1094 Hole HC

SEQ ID NO: 3121 - protein, 215 aa, synthetic construct; identical to SEQ ID NO: 507
  REGION 1..215: note = Ab1094 Knob LC

SEQ ID NO: 3122 - protein, 445 aa, synthetic construct; identical to SEQ ID NO: 508
  REGION 1..445: note = Ab1094 Knob HC

SEQ ID NO: 3123 - protein, 471 aa, synthetic construct; identical to SEQ ID NO: 569
  REGION 1..471: note = Ab1101 Hole HC

SEQ ID NO: 3124 - protein, 215 aa, synthetic construct; identical to SEQ ID NO: 516
  REGION 1..215: note = Ab1101 Knob LC

SEQ ID NO: 3125 - protein, 445 aa, synthetic construct; identical to SEQ ID NO: 517
  REGION 1..445: note = Ab1101 Knob HC

SEQ ID NO: 3126 - protein, 471 aa, synthetic construct; identical to SEQ ID NO: 578
  REGION 1..471: note = Ab1102 Hole HC

SEQ ID NO: 3127 - protein, 215 aa, synthetic construct; identical to SEQ ID NO: 516
  REGION 1..215: note = Ab1102 Knob LC

SEQ ID NO: 3128 - protein, 445 aa, synthetic construct; identical to SEQ ID NO: 517
  REGION 1..445: note = Ab1102 Knob HC

SEQ ID NO: 3129 - protein, 471 aa, synthetic construct; identical to SEQ ID NO: 659
  REGION 1..471: note = Ab1111 Hole HC

SEQ ID NO: 3130 - protein, 215 aa, synthetic construct; identical to SEQ ID NO: 516
  REGION 1..215: note = Ab1111 Knob LC

SEQ ID NO: 3131 - protein, 445 aa, synthetic construct; identical to SEQ ID NO: 517
  REGION 1..445: note = Ab1111 Knob HC

SEQ ID NO: 3132 - protein, 471 aa, synthetic construct; identical to SEQ ID NO: 686
  REGION 1..471: note = Ab1114 Hole HC

SEQ ID NO: 3133 - protein, 215 aa, synthetic construct; identical to SEQ ID NO: 516
  REGION 1..215: note = Ab1114 Knob LC

SEQ ID NO: 3134 - protein, 445 aa, synthetic construct; identical to SEQ ID NO: 517
  REGION 1..445: note = Ab1114 Knob HC

SEQ ID NO: 3135 - protein, 471 aa, synthetic construct; identical to SEQ ID NO: 713
  REGION 1..471: note = Ab1117 Hole HC

SEQ ID NO: 3136 - protein, 215 aa, synthetic construct; identical to SEQ ID NO: 516
  REGION 1..215: note = Ab1117 Knob LC

SEQ ID NO: 3137 - protein, 445 aa, synthetic construct; identical to SEQ ID NO: 517
  REGION 1..445: note = Ab1117 Knob HC

SEQ ID NO: 3138 - protein, 471 aa, synthetic construct; identical to SEQ ID NO: 749
  REGION 1..471: note = Ab1121 Hole HC

SEQ ID NO: 3139 - protein, 215 aa, synthetic construct; identical to SEQ ID NO: 516
  REGION 1..215: note = Ab1121 Knob LC

SEQ ID NO: 3140 - protein, 445 aa, synthetic construct; identical to SEQ ID NO: 517
  REGION 1..445: note = Ab1121 Knob HC

SEQ ID NO: 3141 - protein, 471 aa, synthetic construct; identical to SEQ ID NO: 794
  REGION 1..471: note = Ab1126 Hole HC

SEQ ID NO: 3142 - protein, 215 aa, synthetic construct; identical to SEQ ID NO: 516
  REGION 1..215: note = Ab1126 Knob LC

SEQ ID NO: 3143 - protein, 445 aa, synthetic construct; identical to SEQ ID NO: 517
  REGION 1..445: note = Ab1126 Knob HC

SEQ ID NO: 3144 - protein, 471 aa, synthetic construct; identical to SEQ ID NO: 578
  REGION 1..471: note = Ab1147 Hole HC

SEQ ID NO: 3145 - protein, 215 aa, synthetic construct; identical to SEQ ID NO: 507
  REGION 1..215: note = Ab1147 Knob LC

SEQ ID NO: 3146 - protein, 445 aa, synthetic construct; identical to SEQ ID NO: 508
  REGION 1..445: note = Ab1147 Knob HC

SEQ ID NO: 3147 - protein, 471 aa, synthetic construct; identical to SEQ ID NO: 713
  REGION 1..471: note = Ab1148 Hole HC

SEQ ID NO: 3148 - protein, 215 aa, synthetic construct; identical to SEQ ID NO: 507
  REGION 1..215: note = Ab1148 Knob LC

SEQ ID NO: 3149 - protein, 445 aa, synthetic construct; identical to SEQ ID NO: 508
  REGION 1..445: note = Ab1148 Knob HC

SEQ ID NO: 3150 - protein, 471 aa, synthetic construct; identical to SEQ ID NO: 794
  REGION 1..471: note = Ab1149 Hole HC

SEQ ID NO: 3151 - protein, 215 aa, synthetic construct; identical to SEQ ID NO: 507
  REGION 1..215: note = Ab1149 Knob LC

SEQ ID NO: 3152 - protein, 445 aa, synthetic construct; identical to SEQ ID NO: 508
  REGION 1..445: note = Ab1149 Knob HC

SEQ ID NO: 3153 - protein, 471 aa, synthetic construct; identical to SEQ ID NO: 506
  REGION 1..471: note = Ab1150 Hole HC

SEQ ID NO: 3154 - protein, 219 aa, synthetic construct; identical to SEQ ID NO: 3078
  REGION 1..219: note = Ab1150 Knob LC

SEQ ID NO: 3155 - protein, 445 aa, synthetic construct
  REGION 1..445: note = Ab1150 Knob HC
EVQLVQSGPGLVQPGGSVRISCAASGYTFTNYGMNWVKQAPGKGLEWMGWINTYTGESTYADSFKGRFTFSLDTSASAAYLQINSLRAEDTAVYYCARFAIKGDYWGQGTLLTVSSASTKGPSVFPLAPSSKSTSGGTAALGCLVKDYFPEPVTVSWNSGALTSGVHTFPAVLQSSGLYSLSSVVTVPSSSLGTQTYICNVNHKPSNTKVDKKVEPKSCDKTHTCPPCPAPEAAGGPSVFLFPPKPKDTLMISRTPEVTCVVVDVSHEDPEVKFNWYVDGVEVHNAKTKPREEQYNSTYRVVSVLTVLHQDWLNGKEYKCKVSNKALPAPIEKTISKAKGQPREPQVYTLPPSRDELTKNQVSLWCLVKGFYPSDIAVEWESNGQPENNYKTTPPVLDSDGSFFLYSKLTVDKSRWQQGNVFSCSVMHEALHNHYTQKSLSLSPG

SEQ ID NO: 3156 - protein, 471 aa, synthetic construct; identical to SEQ ID NO: 506
  REGION 1..471: note = Ab1151 Hole HC

SEQ ID NO: 3157 - protein, 219 aa, synthetic construct; identical to SEQ ID NO: 2751
  REGION 1..219: note = Ab1151 Knob LC

SEQ ID NO: 3158 - protein, 452 aa, synthetic construct
  REGION 1..452: note = Ab1151 Knob HC
QVQLVQSGAEVKKPGASVKVSCKASGYTFTEYTIHWVRQAPGQGLEWIGWFYPGNDNIKYAQKFQGRVTMTRDTSISTAYMELSSLRSEDTAVYFCARHEDKYFYGSSYFDYWGQGTLVTVSSASTKGPSVFPLAPSSKSTSGGTAALGCLVKDYFPEPVTVSWNSGALTSGVHTFPAVLQSSGLYSLSSVVTVPSSSLGTQTYICNVNHKPSNTKVDKKVEPKSCDKTHTCPPCPAPEAAGGPSVFLFPPKPKDTLMISRTPEVTCVVVDVSHEDPEVKFNWYVDGVEVHNAKTKPREEQYNSTYRVVSVLTVLHQDWLNGKEYKCKVSNKALPAPIEKTISKAKGQPREPQVYTLPPSRDELTKNQVSLWCLVKGFYPSDIAVEWESNGQPENNYKTTPPVLDSDGSFFLYSKLTVDKSRWQQGNVFSCSVMHEALHNHYTQKSLSLSPG

SEQ ID NO: 3159 - protein, 471 aa, synthetic construct; identical to SEQ ID NO: 506
  REGION 1..471: note = Ab1152 Hole HC

SEQ ID NO: 3160 - protein, 213 aa, synthetic construct; identical to SEQ ID NO: 2759
  REGION 1..213: note = Ab1152 Knob LC

SEQ ID NO: 3161 - protein, 445 aa, synthetic construct
  REGION 1..445: note = Ab1152 Knob HC
QVQLQQSGAELMKPGASVKLSCKATGYTFTGYSIEWIKQRPGHGLEWIGEILPGSGYTNYNEKFKGKATFTADTSSNTAYMQLSSLTTEDSAIYYCARDGPPFAYWGQGTLVTVSAASTKGPSVFPLAPSSKSTSGGTAALGCLVKDYFPEPVTVSWNSGALTSGVHTFPAVLQSSGLYSLSSVVTVPSSSLGTQTYICNVNHKPSNTKVDKKVEPKSCDKTHTCPPCPAPEAAGGPSVFLFPPKPKDTLMISRTPEVTCVVVDVSHEDPEVKFNWYVDGVEVHNAKTKPREEQYNSTYRVVSVLTVLHQDWLNGKEYKCKVSNKALPAPIEKTISKAKGQPREPQVYTLPPSRDELTKNQVSLWCLVKGFYPSDIAVEWESNGQPENNYKTTPPVLDSDGSFFLYSKLTVDKSRWQQGNVFSCSVMHEALHNHYTQKSLSLSPG

SEQ ID NO: 3162 - protein, 475 aa, synthetic construct
  REGION 1..475: note = Ab0650 Hole HC
DIQMTQSPSSLSASVGDRVTITCRSTKSLLHSNGITYLYWYQQKPGKAPKLLIYQMSNLASGVPSRFSSSGSGTDFTLTISSLQPEDFATYYCAQNLEIPRTFGQGTKVELKGGGGSGGGGSGGGGSEVQLVQSGPGLVQPGGSVRISCAASGYTFTNYGMNWVKQAPGKGLEWMGWINTYTGESTYADSFKGRFTFSLDTSASAAYLQINSLRAEDTAVYYCARFAIKGDYWGQGTLLTVSSGGGGSDKTHTCPPCPAPEAAGGPSVFLFPPKPKDTLMISRTPEVTCVVVDVSHEDPEVKFNWYVDGVEVHNAKTKPREEQYNSTYRVVSVLTVLHQDWLNGKEYKCKVSNKALGAPIEKTISKAKGQPREPQVYTLPPIRELMTSNQVSLSCAVKGFYPSDIAVEWESNGQPENNYKTTPPVLDSDGSFFLVSKLTVDKSRWQQGNVFSCSVMHEALHNHYTQKSLSLSPGK

SEQ ID NO: 3163 - protein, 214 aa, synthetic construct; identical to SEQ ID NO: 857
  REGION 1..214: note = Ab0650 Knob LC

SEQ ID NO: 3164 - protein, 705 aa, synthetic construct; identical to SEQ ID NO: 3023
  REGION 1..705: note = Ab0650 Knob HC

SEQ ID NO: 3165 - protein, 472 aa, synthetic construct; identical to SEQ ID NO: 8
  REGION 1..472: note = Ab0651 Hole HC

SEQ ID NO: 3166 - protein, 219 aa, synthetic construct; identical to SEQ ID NO: 3078
  REGION 1..219: note = Ab0651 Knob LC

SEQ ID NO: 3167 - protein, 683 aa, synthetic construct
  REGION 1..683: note = Ab0651 Knob HC
EVQLVQSGPGLVQPGGSVRISCAASGYTFTNYGMNWVKQAPGKGLEWMGWINTYTGESTYADSFKGRFTFSLDTSASAAYLQINSLRAEDTAVYYCARFAIKGDYWGQGTLLTVSSASTKGPSVFPLAPSSKSTSGGTAALGCLVKDYFPEPVTVSWNSGALTSGVHTFPAVLQSSGLYSLSSVVTVPSSSLGTQTYICNVNHKPSNTKVDKKVEPKSCDKTHTGGGGSGGEVQLVQSGPGLVQPGGSVRISCAASGYTFTNYGMNWVKQAPGKGLEWMGWINTYTGESTYADSFKGRFTFSLDTSASAAYLQINSLRAEDTAVYYCARFAIKGDYWGQGTLLTVSSASTKGPSVFPLAPSSKSTSGGTAALGCLVKDYFPEPVTVSWNSGALTSGVHTFPAVLQSSGLYSLSSVVTVPSSSLGTQTYICNVNHKPSNTKVDKKVEPKSCDKTHTCPPCPAPEAAGGPSVFLFPPKPKDTLMISRTPEVTCVVVDVSHEDPEVKFNWYVDGVEVHNAKTKPREEQYNSTYRVVSVLTVLHQDWLNGKEYKCKVSNKALGAPIEKTISKAKGQPREPMVFDLPPSREEMTKNQVSLWCMVKGFYPSDIAVEWESNGQPENNYKTTPPVLDSDGSFFLYSKLTVDKSRWQQGNVFSCSVMHEALHNHYTQKSLSLSPGKHHHHHH

SEQ ID NO: 3168 - protein, 481 aa, synthetic construct; identical to SEQ ID NO: 3084
  REGION 1..481: note = Ab0652 Hole HC

SEQ ID NO: 3169 - protein, 219 aa, synthetic construct; identical to SEQ ID NO: 3078
  REGION 1..219: note = Ab0652 Knob LC

SEQ ID NO: 3170 - protein, 683 aa, synthetic construct; identical to SEQ ID NO: 3167
  REGION 1..683: note = Ab0652 Knob HC

SEQ ID NO: 3171 - protein, 219 aa, synthetic construct; identical to SEQ ID NO: 3078
  REGION 1..219: note = Ab0789 Hole LC

SEQ ID NO: 3172 - protein, 677 aa, synthetic construct
  REGION 1..677: note = Ab0789 Hole HC
EVQLVQSGPGLVQPGGSVRISCAASGYTFTNYGMNWVKQAPGKGLEWMGWINTYTGESTYADSFKGRFTFSLDTSASAAYLQINSLRAEDTAVYYCARFAIKGDYWGQGTLLTVSSASTKGPSVFPLAPSSKSTSGGTAALGCLVKDYFPEPVTVSWNSGALTSGVHTFPAVLQSSGLYSLSSVVTVPSSSLGTQTYICNVNHKPSNTKVDKKVEPKSCDKTHTGGGGSGGEVQLVQSGPGLVQPGGSVRISCAASGYTFTNYGMNWVKQAPGKGLEWMGWINTYTGESTYADSFKGRFTFSLDTSASAAYLQINSLRAEDTAVYYCARFAIKGDYWGQGTLLTVSSASTKGPSVFPLAPSSKSTSGGTAALGCLVKDYFPEPVTVSWNSGALTSGVHTFPAVLQSSGLYSLSSVVTVPSSSLGTQTYICNVNHKPSNTKVDKKVEPKSCDKTHTCPPCPAPEAAGGPSVFLFPPKPKDTLMISRTPEVTCVVVDVSHEDPEVKFNWYVDGVEVHNAKTKPREEQYNSTYRVVSVLTVLHQDWLNGKEYKCKVSNKALGAPIEKTISKAKGQPREPQVYTLPPIRELMTSNQVSLSCAVKGFYPSDIAVEWESNGQPENNYKTTPPVLDSDGSFFLVSKLTVDKSRWQQGNVFSCSVMHEALHNHYTQKSLSLSPGK

SEQ ID NO: 3173 - protein, 478 aa, synthetic construct; identical to SEQ ID NO: 3017
  REGION 1..478: note = Ab0789 Knob HC

SEQ ID NO: 3174 - protein, 213 aa, synthetic construct; identical to SEQ ID NO: 2759
  REGION 1..213: note = Ab0790 Hole LC

SEQ ID NO: 3175 - protein, 677 aa, synthetic construct
  REGION 1..677: note = Ab0790 Hole HC
QVQLQQSGAELMKPGASVKLSCKATGYTFTGYSIEWIKQRPGHGLEWIGEILPGSGYTNYNEKFKGKATFTADTSSNTAYMQLSSLTTEDSAIYYCARDGPPFAYWGQGTLVTVSAASTKGPSVFPLAPSSKSTSGGTAALGCLVKDYFPEPVTVSWNSGALTSGVHTFPAVLQSSGLYSLSSVVTVPSSSLGTQTYICNVNHKPSNTKVDKKVEPKSCDKTHTGGGGSGGQVQLQQSGAELMKPGASVKLSCKATGYTFTGYSIEWIKQRPGHGLEWIGEILPGSGYTNYNEKFKGKATFTADTSSNTAYMQLSSLTTEDSAIYYCARDGPPFAYWGQGTLVTVSAASTKGPSVFPLAPSSKSTSGGTAALGCLVKDYFPEPVTVSWNSGALTSGVHTFPAVLQSSGLYSLSSVVTVPSSSLGTQTYICNVNHKPSNTKVDKKVEPKSCDKTHTCPPCPAPEAAGGPSVFLFPPKPKDTLMISRTPEVTCVVVDVSHEDPEVKFNWYVDGVEVHNAKTKPREEQYNSTYRVVSVLTVLHQDWLNGKEYKCKVSNKALGAPIEKTISKAKGQPREPQVYTLPPIRELMTSNQVSLSCAVKGFYPSDIAVEWESNGQPENNYKTTPPVLDSDGSFFLVSKLTVDKSRWQQGNVFSCSVMHEALHNHYTQKSLSLSPGK

SEQ ID NO: 3176 - protein, 478 aa, synthetic construct; identical to SEQ ID NO: 3017
  REGION 1..478: note = Ab0790 Knob HC

SEQ ID NO: 3177 - protein, 471 aa, synthetic construct; identical to SEQ ID NO: 506
  REGION 1..471: note = Ab1153 Hole HC

SEQ ID NO: 3178 - protein, 215 aa, synthetic construct; identical to SEQ ID NO: 507
  REGION 1..215: note = Ab1153 Knob LC

SEQ ID NO: 3179 - protein, 676 aa, synthetic construct
  REGION 1..676: note = Ab1153 Knob HC
EVQLVESGGGLVQPGGSLRLSCAASGFTFSNYWMNWVRQAPGKGLEWVAQIRVKSENFATHYVDSVKGRFTISRDDSKSTVYLQMNSLRAEDTAVYYCTLYDGFSWGQGTLVTVSSASTKGPSVFPLAPSSKSTSGGTAALGCLVKDYFPEPVTVSWNSGALTSGVHTFPAVLQSSGLYSLSSVVTVPSSSLGTQTYICNVNHKPSNTKVDKKVEPKSCDKTHTGGGGSGGEVQLVESGGGLVQPGGSLRLSCAASGFTFSNYWMNWVRQAPGKGLEWVAQIRVKSENFATHYVDSVKGRFTISRDDSKSTVYLQMNSLRAEDTAVYYCTLYDGFSWGQGTLVTVSSASTKGPSVFPLAPSSKSTSGGTAALGCLVKDYFPEPVTVSWNSGALTSGVHTFPAVLQSSGLYSLSSVVTVPSSSLGTQTYICNVNHKPSNTKVDKKVEPKSCDKTHTCPPCPAPEAAGGPSVFLFPPKPKDTLMISRTPEVTCVVVDVSHEDPEVKFNWYVDGVEVHNAKTKPREEQYNSTYRVVSVLTVLHQDWLNGKEYKCKVSNKALPAPIEKTISKAKGQPREPQVYTLPPSRDELTKNQVSLWCLVKGFYPSDIAVEWESNGQPENNYKTTPPVLDSDGSFFLYSKLTVDKSRWQQGNVFSCSVMHEALHNHYTQKSLSLSPG

SEQ ID NO: 3180 - protein, 481 aa, synthetic construct; identical to SEQ ID NO: 2232
  REGION 1..481: note = Ab0586 Hole HC

SEQ ID NO: 3181 - protein, 219 aa, synthetic construct; identical to SEQ ID NO: 3078
  REGION 1..219: note = Ab0586 Knob LC

SEQ ID NO: 3182 - protein, 457 aa, synthetic construct
  REGION 1..457: note = Ab0586 Knob HC
EVQLVQSGPGLVQPGGSVRISCAASGYTFTNYGMNWVKQAPGKGLEWMGWINTYTGESTYADSFKGRFTFSLDTSASAAYLQINSLRAEDTAVYYCARFAIKGDYWGQGTLLTVSSASTKGPSVFPLAPSSKSTSGGTAALGCLVKDYFPEPVTVSWNSGALTSGVHTFPAVLQSSGLYSLSSVVTVPSSSLGTQTYICNVNHKPSNTKVDKKVEPKSCGGGGSDKTHTCPPCPAPEAAGGPSVFLFPPKPKDTLMISRTPEVTCVVVDVSHEDPEVKFNWYVDGVEVHNAKTKPREEQYNSTYRVVSVLTVLHQDWLNGKEYKCKVSNKALGAPIEKTISKAKGQPREPMVFDLPPSREEMTKNQVSLWCMVKGFYPSDIAVEWESNGQPENNYKTTPPVLDSDGSFFLYSKLTVDKSRWQQGNVFSCSVMHEALHNHYTQKSLSLSPGKHHHHHH

SEQ ID NO: 3183 - protein, 482 aa, synthetic construct; identical to SEQ ID NO: 1680
  REGION 1..482: note = Ab0587 Hole HC

SEQ ID NO: 3184 - protein, 219 aa, synthetic construct; identical to SEQ ID NO: 3078
  REGION 1..219: note = Ab0587 Knob LC

SEQ ID NO: 3185 - protein, 457 aa, synthetic construct; identical to SEQ ID NO: 3182
  REGION 1..457: note = Ab0587 Knob HC

SEQ ID NO: 3186 - protein, 482 aa, synthetic construct; identical to SEQ ID NO: 1736
  REGION 1..482: note = Ab0588 Hole HC

SEQ ID NO: 3187 - protein, 219 aa, synthetic construct; identical to SEQ ID NO: 3078
  REGION 1..219: note = Ab0588 Knob LC

SEQ ID NO: 3188 - protein, 457 aa, synthetic construct; identical to SEQ ID NO: 3182
  REGION 1..457: note = Ab0588 Knob HC

SEQ ID NO: 3189 - protein, 481 aa, synthetic construct; identical to SEQ ID NO: 1752
  REGION 1..481: note = Ab0589 Hole HC

SEQ ID NO: 3190 - protein, 219 aa, synthetic construct; identical to SEQ ID NO: 3078
  REGION 1..219: note = Ab0589 Knob LC

SEQ ID NO: 3191 - protein, 457 aa, synthetic construct; identical to SEQ ID NO: 3182
  REGION 1..457: note = Ab0589 Knob HC

SEQ ID NO: 3192 - protein, 482 aa, synthetic construct; identical to SEQ ID NO: 1808
  REGION 1..482: note = Ab0590 Hole HC

SEQ ID NO: 3193 - protein, 219 aa, synthetic construct; identical to SEQ ID NO: 3078
  REGION 1..219: note = Ab0590 Knob LC

SEQ ID NO: 3194 - protein, 457 aa, synthetic construct; identical to SEQ ID NO: 3182
  REGION 1..457: note = Ab0590 Knob HC

SEQ ID NO: 3195 - protein, 481 aa, synthetic construct; identical to SEQ ID NO: 1872
  REGION 1..481: note = Ab0591 Hole HC

SEQ ID NO: 3196 - protein, 219 aa, synthetic construct; identical to SEQ ID NO: 3078
  REGION 1..219: note = Ab0591 Knob LC

SEQ ID NO: 3197 - protein, 457 aa, synthetic construct; identical to SEQ ID NO: 3182
  REGION 1..457: note = Ab0591 Knob HC

SEQ ID NO: 3198 - protein, 482 aa, synthetic construct; identical to SEQ ID NO: 2040
  REGION 1..482: note = Ab0592 Hole HC

SEQ ID NO: 3199 - protein, 219 aa, synthetic construct; identical to SEQ ID NO: 3078
  REGION 1..219: note = Ab0592 Knob LC

SEQ ID NO: 3200 - protein, 457 aa, synthetic construct; identical to SEQ ID NO: 3182
  REGION 1..457: note = Ab0592 Knob HC

SEQ ID NO: 3201 - protein, 481 aa, synthetic construct; identical to SEQ ID NO: 2104
  REGION 1..481: note = Ab0593 Hole HC

SEQ ID NO: 3202 - protein, 219 aa, synthetic construct; identical to SEQ ID NO: 3078
  REGION 1..219: note = Ab0593 Knob LC

SEQ ID NO: 3203 - protein, 457 aa, synthetic construct; identical to SEQ ID NO: 3182
  REGION 1..457: note = Ab0593 Knob HC

SEQ ID NO: 3204 - protein, 482 aa, synthetic construct; identical to SEQ ID NO: 2184
  REGION 1..482: note = Ab0594 Hole HC

SEQ ID NO: 3205 - protein, 219 aa, synthetic construct; identical to SEQ ID NO: 3078
  REGION 1..219: note = Ab0594 Knob LC

SEQ ID NO: 3206 - protein, 457 aa, synthetic construct; identical to SEQ ID NO: 3182
  REGION 1..457: note = Ab0594 Knob HC

SEQ ID NO: 3207 - protein, 481 aa, synthetic construct; identical to SEQ ID NO: 2232
  REGION 1..481: note = Ab0619 Hole HC

SEQ ID NO: 3208 - protein, 219 aa, synthetic construct; identical to SEQ ID NO: 3078
  REGION 1..219: note = Ab0619 Knob LC

SEQ ID NO: 3209 - protein, 452 aa, synthetic construct; identical to SEQ ID NO: 3083
  REGION 1..452: note = Ab0619 Knob HC

SEQ ID NO: 3210 - protein, 481 aa, synthetic construct; identical to SEQ ID NO: 2232
  REGION 1..481: note = Ab0674 Hole HC

SEQ ID NO: 3211 - protein, 213 aa, synthetic construct; identical to SEQ ID NO: 2759
  REGION 1..213: note = Ab0674 Knob LC

SEQ ID NO: 3212 - protein, 452 aa, synthetic construct
  REGION 1..452: note = Ab0674 Knob HC
QVQLQQSGAELMKPGASVKLSCKATGYTFTGYSIEWIKQRPGHGLEWIGEILPGSGYTNYNEKFKGKATFTADTSSNTAYMQLSSLTTEDSAIYYCARDGPPFAYWGQGTLVTVSAASTKGPSVFPLAPSSKSTSGGTAALGCLVKDYFPEPVTVSWNSGALTSGVHTFPAVLQSSGLYSLSSVVTVPSSSLGTQTYICNVNHKPSNTKVDKKVEPKSCDKTHTCPPCPAPEAAGGPSVFLFPPKPKDTLMISRTPEVTCVVVDVSHEDPEVKFNWYVDGVEVHNAKTKPREEQYNSTYRVVSVLTVLHQDWLNGKEYKCKVSNKALGAPIEKTISKAKGQPREPMVFDLPPSREEMTKNQVSLWCMVKGFYPSDIAVEWESNGQPENNYKTTPPVLDSDGSFFLYSKLTVDKSRWQQGNVFSCSVMHEALHNHYTQKSLSLSPGKHHHHHH

SEQ ID NO: 3213 - protein, 481 aa, synthetic construct; identical to SEQ ID NO: 2232
  REGION 1..481: note = Ab0675 Hole HC

SEQ ID NO: 3214 - protein, 219 aa, synthetic construct; identical to SEQ ID NO: 2743
  REGION 1..219: note = Ab0675 Knob LC

SEQ ID NO: 3215 - protein, 459 aa, synthetic construct
  REGION 1..459: note = Ab0675 Knob HC
QVQLEQSGAELVKPGASVKLSCKASGYTFTEYTIHWVKQRSGQGLEWIGWFYPGNDNIKYNEKFKDRATLTADKSSHTVYLELSRLTSEDSAVFFCARHEDKYFYGSSYFDYWGQGTTLTVSSASTKGPSVFPLAPSSKSTSGGTAALGCLVKDYFPEPVTVSWNSGALTSGVHTFPAVLQSSGLYSLSSVVTVPSSSLGTQTYICNVNHKPSNTKVDKKVEPKSCDKTHTCPPCPAPEAAGGPSVFLFPPKPKDTLMISRTPEVTCVVVDVSHEDPEVKFNWYVDGVEVHNAKTKPREEQYNSTYRVVSVLTVLHQDWLNGKEYKCKVSNKALGAPIEKTISKAKGQPREPMVFDLPPSREEMTKNQVSLWCMVKGFYPSDIAVEWESNGQPENNYKTTPPVLDSDGSFFLYSKLTVDKSRWQQGNVFSCSVMHEALHNHYTQKSLSLSPGKHHHHHH

SEQ ID NO: 3216 - protein, 481 aa, synthetic construct; identical to SEQ ID NO: 2232
  REGION 1..481: note = Ab0682 Hole HC

SEQ ID NO: 3217 - protein, 215 aa, synthetic construct; identical to SEQ ID NO: 2543
  REGION 1..215: note = Ab0682 Knob LC

SEQ ID NO: 3218 - protein, 452 aa, synthetic construct
  REGION 1..452: note = Ab0682 Knob HC
EVKLEESGGGLVQPGGSMKLSCVASGFTFSNYWMNWVRQSPEKGLEWVAQIRVKSENFATHYAESVKGRFTISRDDSKSSVYLQMNNLRAEDTGIYYCTLYDGFSWGQGTTLTVSSASTKGPSVFPLAPSSKSTSGGTAALGCLVKDYFPEPVTVSWNSGALTSGVHTFPAVLQSSGLYSLSSVVTVPSSSLGTQTYICNVNHKPSNTKVDKKVEPKSCDKTHTCPPCPAPEAAGGPSVFLFPPKPKDTLMISRTPEVTCVVVDVSHEDPEVKFNWYVDGVEVHNAKTKPREEQYNSTYRVVSVLTVLHQDWLNGKEYKCKVSNKALGAPIEKTISKAKGQPREPMVFDLPPSREEMTKNQVSLWCMVKGFYPSDIAVEWESNGQPENNYKTTPPVLDSDGSFFLYSKLTVDKSRWQQGNVFSCSVMHEALHNHYTQKSLSLSPGKHHHHHH

SEQ ID NO: 3219 - protein, 482 aa, synthetic construct; identical to SEQ ID NO: 2184
  REGION 1..482: note = Ab0777 Hole HC

SEQ ID NO: 3220 - protein, 219 aa, synthetic construct; identical to SEQ ID NO: 3078
  REGION 1..219: note = Ab0777 Knob LC

SEQ ID NO: 3221 - protein, 452 aa, synthetic construct; identical to SEQ ID NO: 3083
  REGION 1..452: note = Ab0777 Knob HC

SEQ ID NO: 3222 - protein, 482 aa, synthetic construct; identical to SEQ ID NO: 3036
  REGION 1..482: note = Ab1007 Hole HC

SEQ ID NO: 3223 - protein, 219 aa, synthetic construct; identical to SEQ ID NO: 3078
  REGION 1..219: note = Ab1007 Knob LC

SEQ ID NO: 3224 - protein, 452 aa, synthetic construct; identical to SEQ ID NO: 3083
  REGION 1..452: note = Ab1007 Knob HC

SEQ ID NO: 3225 - protein, 215 aa, synthetic construct; identical to SEQ ID NO: 516
  REGION 1..215: note = Ab1070 Hole LC

SEQ ID NO: 3226 - protein, 446 aa, synthetic construct; identical to SEQ ID NO: 3100
  REGION 1..446: note = Ab1070 Hole HC

SEQ ID NO: 3227 - protein, 482 aa, synthetic construct; identical to SEQ ID NO: 3047
  REGION 1..482: note = Ab1070 Knob HC

SEQ ID NO: 3228 - protein, 481 aa, synthetic construct; identical to SEQ ID NO: 2232
  REGION 1..481: note = Ab0653 Hole HC

SEQ ID NO: 3229 - protein, 219 aa, synthetic construct; identical to SEQ ID NO: 3078
  REGION 1..219: note = Ab0653 Knob LC

SEQ ID NO: 3230 - protein, 683 aa, synthetic construct; identical to SEQ ID NO: 3167
  REGION 1..683: note = Ab0653 Knob HC

SEQ ID NO: 3231 - protein, 227 aa, synthetic construct
  REGION 1..227: note = IgG1 Fc
DKTHTCPPCPAPELLGGPSVFLFPPKPKDTLMISRTPEVTCVVVDVSHEDPEVKFNWYVDGVEVHNAKTKPREEQYNSTYRVVSVLTVLHQDWLNGKEYKCKVSNKALPAPIEKTISKAKGQPREPQVYTLPPSRDELTKNQVSLTCLVKGFYPSDIAVEWESNGQPENNYKTTPPVLDSDGSFFLYSKLTVDKSRWQQGNVFSCSVMHEALHNHYTQKSLSLSPGK

SEQ ID NO: 3232 - protein, 223 aa, synthetic construct
  REGION 1..223: note = IgG2 Fc
VECPPCPAPPVAGPSVFLFPPKPKDTLMISRTPEVTCVVVDVSHEDPEVQFNWYVDGVEVHNAKTKPREEQFNSTFRVVSVLTVVHQDWLNGKEYKCKVSNKGLPAPIEKTISKTKGQPREPQVYTLPPSREEMTKNQVSLTCLVKGFYPSDISVEWESNGQPENNYKTTPPMLDSDGSFFLYSKLTVDKSRWQQGNVFSCSVMHEALHNHYTQKSLSLSPGK

SEQ ID NO: 3233 - protein, 227 aa, synthetic construct
  REGION 1..227: note = IgG1 Fc (LALA mutations)
DKTHTCPPCPAPEAAGGPSVFLFPPKPKDTLMISRTPEVTCVVVDVSHEDPEVKFNWYVDGVEVHNAKTKPREEQYNSTYRVVSVLTVLHQDWLNGKEYKCKVSNKALPAPIEKTISKAKGQPREPQVYTLPPSRDELTKNQVSLTCLVKGFYPSDIAVEWESNGQPENNYKTTPPVLDSDGSFFLYSKLTVDKSRWQQGNVFSCSVMHEALHNHYTQKSLSLSPGK

SEQ ID NO: 3234 - protein, 227 aa, synthetic construct
  REGION 1..227: note = IgG1 Fc (LALAPG mutations)
DKTHTCPPCPAPEAAGGPSVFLFPPKPKDTLMISRTPEVTCVVVDVSHEDPEVKFNWYVDGVEVHNAKTKPREEQYNSTYRVVSVLTVLHQDWLNGKEYKCKVSNKALGAPIEKTISKAKGQPREPQVYTLPPSRDELTKNQVSLTCLVKGFYPSDIAVEWESNGQPENNYKTTPPVLDSDGSFFLYSKLTVDKSRWQQGNVFSCSVMHEALHNHYTQKSLSLSPGK

SEQ ID NO: 3235 - protein, 227 aa, synthetic construct [sequence omitted]

SEQ ID NO: 3236 - protein, 227 aa, synthetic construct
  REGION 1..227: note = IgG1 Fc (Hole mutations)
DKTHTCPPCPAPELLGGPSVFLFPPKPKDTLMISRTPEVTCVVVDVSHEDPEVKFNWYVDGVEVHNAKTKPREEQYNSTYRVVSVLTVLHQDWLNGKEYKCKVSNKALPAPIEKTISKAKGQPREPQVYTLPPSRDELTKNQVSLSCAVKGFYPSDIAVEWESNGQPENNYKTTPPVLDSDGSFFLVSKLTVDKSRWQQGNVFSCSVMHEALHNHYTQKSLSLSPGK

SEQ ID NO: 3237 - protein, 227 aa, synthetic construct
  REGION 1..227: note = IgG1 Fc (LALA + Knob mutations)
DKTHTCPPCPAPEAAGGPSVFLFPPKPKDTLMISRTPEVTCVVVDVSHEDPEVKFNWYVDGVEVHNAKTKPREEQYNSTYRVVSVLTVLHQDWLNGKEYKCKVSNKALPAPIEKTISKAKGQPREPQVYTLPPSRDELTKNQVSLWCLVKGFYPSDIAVEWESNGQPENNYKTTPPVLDSDGSFFLYSKLTVDKSRWQQGNVFSCSVMHEALHNHYTQKSLSLSPGK

SEQ ID NO: 3238 - protein, 227 aa, synthetic construct
  REGION 1..227: note = IgG1 Fc (LALA + Hole mutations)
DKTHTCPPCPAPEAAGGPSVFLFPPKPKDTLMISRTPEVTCVVVDVSHEDPEVKFNWYVDGVEVHNAKTKPREEQYNSTYRVVSVLTVLHQDWLNGKEYKCKVSNKALPAPIEKTISKAKGQPREPQVYTLPPSRDELTKNQVSLSCAVKGFYPSDIAVEWESNGQPENNYKTTPPVLDSDGSFFLVSKLTVDKSRWQQGNVFSCSVMHEALHNHYTQKSLSLSPGK

SEQ ID NO: 3239 - protein, 227 aa, synthetic construct
  REGION 1..227: note = IgG1 Fc (LALAPG + Knob mutations)
DKTHTCPPCPAPEAAGGPSVFLFPPKPKDTLMISRTPEVTCVVVDVSHEDPEVKFNWYVDGVEVHNAKTKPREEQYNSTYRVVSVLTVLHQDWLNGKEYKCKVSNKALGAPIEKTISKAKGQPREPQVYTLPPSRDELTKNQVSLWCLVKGFYPSDIAVEWESNGQPENNYKTTPPVLDSDGSFFLYSKLTVDKSRWQQGNVFSCSVMHEALHNHYTQKSLSLSPGK

SEQ ID NO: 3240 - protein, 227 aa, synthetic construct
  REGION 1..227: note = IgG1 Fc (LALAPG + Hole mutations)
DKTHTCPPCPAPEAAGGPSVFLFPPKPKDTLMISRTPEVTCVVVDVSHEDPEVKFNWYVDGVEVHNAKTKPREEQYNSTYRVVSVLTVLHQDWLNGKEYKCKVSNKALGAPIEKTISKAKGQPREPQVYTLPPSRDELTKNQVSLSCAVKGFYPSDIAVEWESNGQPENNYKTTPPVLDSDGSFFLVSKLTVDKSRWQQGNVFSCSVMHEALHNHYTQKSLSLSPGK

SEQ ID NO: 3241 - protein, 226 aa, synthetic construct
  REGION 1..226: note = IgG1 Fc (LALA + Knob + K447del mutations)
DKTHTCPPCPAPEAAGGPSVFLFPPKPKDTLMISRTPEVTCVVVDVSHEDPEVKFNWYVDGVEVHNAKTKPREEQYNSTYRVVSVLTVLHQDWLNGKEYKCKVSNKALPAPIEKTISKAKGQPREPQVYTLPPSRDELTKNQVSLWCLVKGFYPSDIAVEWESNGQPENNYKTTPPVLDSDGSFFLYSKLTVDKSRWQQGNVFSCSVMHEALHNHYTQKSLSLSPG

SEQ ID NO: 3242 - protein, 226 aa, synthetic construct
  REGION 1..226: note = IgG1 Fc (LALA + Hole + K447del mutations)
DKTHTCPPCPAPEAAGGPSVFLFPPKPKDTLMISRTPEVTCVVVDVSHEDPEVKFNWYVDGVEVHNAKTKPREEQYNSTYRVVSVLTVLHQDWLNGKEYKCKVSNKALPAPIEKTISKAKGQPREPQVYTLPPSRDELTKNQVSLSCAVKGFYPSDIAVEWESNGQPENNYKTTPPVLDSDGSFFLVSKLTVDKSRWQQGNVFSCSVMHEALHNHYTQKSLSLSPG

SEQ ID NO: 3243 - protein, 226 aa, synthetic construct
  REGION 1..226: note = IgG1 Fc (LALAPG + Knob + K447del mutations)
DKTHTCPPCPAPEAAGGPSVFLFPPKPKDTLMISRTPEVTCVVVDVSHEDPEVKFNWYVDGVEVHNAKTKPREEQYNSTYRVVSVLTVLHQDWLNGKEYKCKVSNKALGAPIEKTISKAKGQPREPQVYTLPPSRDELTKNQVSLWCLVKGFYPSDIAVEWESNGQPENNYKTTPPVLDSDGSFFLYSKLTVDKSRWQQGNVFSCSVMHEALHNHYTQKSLSLSPG

SEQ ID NO: 3244 - protein, 226 aa, synthetic construct
  REGION 1..226: note = IgG1 Fc (LALAPG + Hole + K447del mutations)
DKTHTCPPCPAPEAAGGPSVFLFPPKPKDTLMISRTPEVTCVVVDVSHEDPEVKFNWYVDGVEVHNAKTKPREEQYNSTYRVVSVLTVLHQDWLNGKEYKCKVSNKALGAPIEKTISKAKGQPREPQVYTLPPSRDELTKNQVSLSCAVKGFYPSDIAVEWESNGQPENNYKTTPPVLDSDGSFFLVSKLTVDKSRWQQGNVFSCSVMHEALHNHYTQKSLSLSPG

SEQ ID NO: 3245 - protein, 225 aa, synthetic construct
  REGION 1..225: note = IgG4 monomeric Fc
GPPGPSGPAPEFLGGPSVFLFPPKPKDTLYITREPEVTCVVVDVSQEDPEVQFNWYVDGVEVHNAKTKPREEQFNSTYRVVSVLTVLHQDWLNGKEYKCKVSNKGLPSSIEKTISKAKGQPREPQVYTFPPSQEEMTKNQVSLRCLVKGFYPSDIAVEWESNGQPENNYKTTKPVLDSDGSFKLESRLTVDKSRWQEGNVFSCSVMHEALHNHYTQKSLSLSLGK

SEQ ID NO: 3246 - protein, 120 aa, synthetic construct
  REGION 1..120: note = Variable heavy (vh) domain
EVQLVLSGGGFVQPGGSLKLSCAASGFTFSSYAMSWVRQNPERRLVWVATITGGGRNTYYPDSVKGRFTISRDNAKNTLYLQMSSLRSEDTAMYYCTRQGYDGYTWFAYWGQGTLVTVSS

SEQ ID NO: 3247 - protein, 447 aa, synthetic construct
  REGION 1..447: note = Full length heavy chain
EVQLVLSGGGFVQPGGSLKLSCAASGFTFSSYAMSWVRQNPERRLVWVATITGGGRNTYYPDSVKGRFTISRDNAKNTLYLQMSSLRSEDTAMYYCTRQGYDGYTWFAYWGQGTLVTVSSASTKGPSVFPLAPCSRSTSESTAALGCLVKDYFPEPVTVSWNSGALTSGVHTFPAVLQSSGLYSLSSVVTVPSSSLGTKTYTCNVDHKPSNTKVDKRVESKYGPPCPPCPAPEFLGGPSVFLFPPKPKDTLMISRTPEVTCVVVDVSQEDPEVQFNWYVDGVEVHNAKTKPREEQFNSTYRVVSVLTVLHQDWLNGKEYKCKVSNKGLPSSIEKTISKAKGQPREPQVYTLPPSQEEMTKNQVSLTCLVKGFYPSDIAVEWESNGQPENNYKTTPPVLDSDGSFFLYSRLTVDKSRWQEGNVFSCSVMHEALHNHYTQKSLSLSPGK

SEQ ID NO: 3248 - protein, 112 aa, synthetic construct
  REGION 1..112: note = Variable light (vl) domain
DIVLTQSPTSLAVSLGQRATISCRASESVDNSGISFMNWFQQKPGQPPKLLIYAASNPGSGVPARFSGSGSGTDFSLNIHPMEEDDTAMYFCQQSKEVPWTFGGGTELEIKR

SEQ ID NO: 3249 - protein, 218 aa, synthetic construct
  REGION 1..218: note = Full length light chain
DIVLTQSPTSLAVSLGQRATISCRASESVDNSGISFMNWFQQKPGQPPKLLIYAASNPGSGVPARFSGSGSGTDFSLNIHPMEEDDTAMYFCQQSKEVPWTFGGGTELEIKRTVAAPSVFIFPPSDEQLKSGTASVVCLLNNFYPREAKVQWKVDNALQSGNSQESVTEQDSKDSTYSLSSTLTLSKADYEKHKVYACEVTHQGLSSPVTKSFNRGEC

SEQ ID NO: 3250 - protein, 447 aa, synthetic construct
  REGION 1..447: note = Full length heavy chain (SEQ ID NO:33 from WO2016028656)
QVQLVQSGVEVKKPGASVKVSCKASGYTFTNYYMYWVRQAPGQGLEWMGGINPSNGGTNFNEKFKNRVTLTTDSSTTTAYMELKSLQFDDTAVYYCARRDYRFDMGFDYWGQGTTVTVSSASTKGPSVFPLAPCSRSTSESTAALGCLVKDYFPEPVTVSWNSGALTSGVHTFPAVLQSSGLYSLSSVVTVPSSSLGTKTYTCNVDHKPSNTKVDKRVESKYGPPCPPCPAPEFLGGPSVFLFPPKPKDTLMISRTPEVTCVVVDVSQEDPEVQFNWYVDGVEVHNAKTKPREEQFNSTYRVVSVLTVLHQDWLNGKEYKCKVSNKGLPSSIEKTISKAKGQPREPQVYTLPPSQEEMTKNQVSLTCLVKGFYPSDIAVEWESNGQPENNYKTTPPVLDSDGSFFLYSRLTVDKSRWQEGNVFSCSVMHEALHNHYTQKSLSLSLGK

SEQ ID NO: 3251 - protein, 218 aa, synthetic construct
  REGION 1..218: note = Full length light chain (SEQ ID NO:34 from WO2016028656)
EIVLTQSPATLSLSPGERATLSCRASKGVSTSGYSYLHWYQQKPGQAPRLLIYLASYLESGVPARFSGSGSGTDFTLTISSLEPEDFAVYYCQHSRDLPLTFGGGTKVEIKRTVAAPSVFIFPPSDEQLKSGTASVVCLLNNFYPREAKVQWKVDNALQSGNSQESVTEQDSKDSTYSLSSTLTLSKADYEKHKVYACEVTHQGLSSPVTKSFNRGEC

SEQ ID NO: 3252 - protein, 113 aa, synthetic construct [sequence omitted]

SEQ ID NO: 3253 - protein, 440 aa, synthetic construct
  REGION 1..440: note = Full length heavy chain
QVQLVESGGGVVQPGRSLRLDCKASGITFSNSGMHWVRQAPGKGLEWVAVIWYDGSKRYYADSVKGRFTISRDNSKNTLFLQMNSLRAEDTAVYYCATNDDYWGQGTLVTVSSASTKGPSVFPLAPCSRSTSESTAALGCLVKDYFPEPVTVSWNSGALTSGVHTFPAVLQSSGLYSLSSVVTVPSSSLGTKTYTCNVDHKPSNTKVDKRVESKYGPPCPPCPAPEFLGGPSVFLFPPKPKDTLMISRTPEVTCVVVDVSQEDPEVQFNWYVDGVEVHNAKTKPREEQFNSTYRVVSVLTVLHQDWLNGKEYKCKVSNKGLPSSIEKTISKAKGQPREPQVYTLPPSQEEMTKNQVSLTCLVKGFYPSDIAVEWESNGQPENNYKTTPPVLDSDGSFFLYSRLTVDKSRWQEGNVFSCSVMHEALHNHYTQKSLSLSLGK

SEQ ID NO: 3254 - protein, 108 aa, synthetic construct
  REGION 1..108: note = Variable light (vl) domain
EIVLTQSPATLSLSPGERATLSCRASQSVSSYLAWYQQKPGQAPRLLIYDASNRATGIPARFSGSGSGTDFTLTISSLEPEDFAVYYCQQSSNWPRTFGQGTKVEIKR

SEQ ID NO: 3255 - protein, 214 aa, synthetic construct
  REGION 1..214: note = Full length light chain
EIVLTQSPATLSLSPGERATLSCRASQSVSSYLAWYQQKPGQAPRLLIYDASNRATGIPARFSGSGSGTDFTLTISSLEPEDFAVYYCQQSSNWPRTFGQGTKVEIKRTVAAPSVFIFPPSDEQLKSGTASVVCLLNNFYPREAKVQWKVDNALQSGNSQESVTEQDSKDSTYSLSSTLTLSKADYEKHKVYACEVTHQGLSSPVTKSFNRGEC

SEQ ID NO: 3256 - protein, 440 aa, synthetic construct; identical to SEQ ID NO: 3253
  REGION 1..440: note = Full length heavy chain (SEQ ID NO:35 from WO2016028656)

SEQ ID NO: 3257 - protein, 214 aa, synthetic construct; identical to SEQ ID NO: 3255
  REGION 1..214: note = Full length light chain (SEQ ID NO:36 from WO2016028656)

SEQ ID NO: 3258 - protein, 117 aa, synthetic construct [sequence omitted]

SEQ ID NO: 3259 - protein, 107 aa, synthetic construct [sequence omitted]

SEQ ID NO: 3260 - protein, 444 aa, synthetic construct
  REGION 1..444: note = Full length heavy chain (SEQ ID NO:9 from US20170174779]
EVQLLESGGVLVQPGGSLRLSCAASGFTFSNFGMTWVRQAPGKGLEWVSGISGGGRDTYFADSVKGRFTISRDNSKNTLYLQMNSLKGEDTAVYYCVKWGNIYFDYWGQGTLVTVSSASTKGPSVFPLAPCSRSTSESTAALGCLVKDYFPEPVTVSWNSGALTSGVHTFPAVLQSSGLYSLSSVVTVPSSSLGTKTYTCNVDHKPSNTKVDKRVESKYGPPCPPCPAPEFLGGPSVFLFPPKPKDTLMISRTPEVTCVVVDVSQEDPEVQFNWYVDGVEVHNAKTKPREEQFNSTYRVVSVLTVLHQDWLNGKEYKCKVSNKGLPSSIEKTISKAKGQPREPQVYTLPPSQEEMTKNQVSLTCLVKGFYPSDIAVEWESNGQPENNYKTTPPVLDSDGSFFLYSRLTVDKSRWQEGNVFSCSVMHEALHNHYTQKSLSLSLGK

SEQ ID NO: 3261 - protein, 214 aa, synthetic construct
  REGION 1..214: note = Full length light chain (SEQ ID NO:10 from US20170174779)
DIQMTQSPSSLSASVGDSITITCRASLSINTFLNWYQQKPGKAPNLLIYAASSLHGGVPSRFSGSGSGTDFTLTIRTLQPEDFATYYCQQSSNTPFTFGPGTVVDFRRTVAAPSVFIFPPSDEQLKSGTASVVCLLNNFYPREAKVQWKVDNALQSGNSQESVTEQDSKDSTYSLSSTLTLSKADYEKHKVYACEVTHQGLSSPVTKSFNRGEC

SEQ ID NO: 3262 - protein, 241 aa, synthetic construct
  REGION 1..241: note = Anti-CD28 (TGN1412) scFv
QVQLVQSGAEVKKPGASVKVSCKASGYTFTSYYIHWVRQAPGQGLEWIGCIYPGNVNTNYNEKFKDRATLTVDTSISTAYMELSRLRSDDTAVYFCTRSHYGLDWNFDVWGQGTTVTVSSGGGGSGGGGSGGGGSDIQMTQSPSSLSASVGDRVTITCHASQNIYVWLNWYQQKPGKAPKLLIYKASNLHTGVPSRFSGSGSGTDFTLTISSLQPEDFATYYCQQGQTYPYTFGGGTKVEI

SEQ ID NO: 3263 - protein, 184 aa, synthetic construct
  REGION 1..184: note = 4-1BB Monomer
REGPELSPDDPAGLLDLRQGMFAQLVAQNVLLIDGPLSWYSDPGLAGVSLTGGLSYKEDTKELVVAKAGVYYVFFQLELRRVVAGEGSGSVSLALHLQPLRSAAGAAALALTVDLPPASSEARNSAFGFQGRLLHLSAGQRLGVHLHTEARARHAWQLTQGATVLGLFRVTPEIPAGLPSPRSE

SEQ ID NO: 3264 - protein, 378 aa, synthetic construct
  REGION 1..378: note = 41BB Dimer
REGPELSPDDPAGLLDLRQGMFAQLVAQNVLLIDGPLSWYSDPGLAGVSLTGGLSYKEDTKELVVAKAGVYYVFFQLELRRVVAGEGSGSVSLALHLQPLRSAAGAAALALTVDLPPASSEARNSAFGFQGRLLHLSAGQRLGVHLHTEARARHAWQLTQGATVLGLFRVTPEIPAGLPSPRSEGGGGSGGGGSREGPELSPDDPAGLLDLRQGMFAQLVAQNVLLIDGPLSWYSDPGLAGVSLTGGLSYKEDTKELVVAKAGVYYVFFQLELRRVVAGEGSGSVSLALHLQPLRSAAGAAALALTVDLPPASSEARNSAFGFQGRLLHLSAGQRLGVHLHTEARARHAWQLTQGATVLGLFRVTPEIPAGLPSPRSE

SEQ ID NO: 3265 - protein, 572 aa, synthetic construct
  REGION 1..572: note = 41BB Trimer
REGPELSPDDPAGLLDLRQGMFAQLVAQNVLLIDGPLSWYSDPGLAGVSLTGGLSYKEDTKELVVAKAGVYYVFFQLELRRVVAGEGSGSVSLALHLQPLRSAAGAAALALTVDLPPASSEARNSAFGFQGRLLHLSAGQRLGVHLHTEARARHAWQLTQGATVLGLFRVTPEIPAGLPSPRSEGGGGSGGGGSREGPELSPDDPAGLLDLRQGMFAQLVAQNVLLIDGPLSWYSDPGLAGVSLTGGLSYKEDTKELVVAKAGVYYVFFQLELRRVVAGEGSGSVSLALHLQPLRSAAGAAALALTVDLPPASSEARNSAFGFQGRLLHLSAGQRLGVHLHTEARARHAWQLTQGATVLGLFRVTPEIPAGLPSPRSEGGGGSGGGGSREGPELSPDDPAGLLDLRQGMFAQLVAQNVLLIDGPLSWYSDPGLAGVSLTGGLSYKEDTKELVVAKAGVYYVFFQLELRRVVAGEGSGSVSLALHLQPLRSAAGAAALALTVDLPPASSEARNSAFGFQGRLLHLSAGQRLGVHLHTEARARHAWQLTQGATVLGLFRVTPEIPAGLPSPRSE

SEQ ID NO: 3266 - protein, 215 aa, synthetic construct; identical to SEQ ID NO: 15
  REGION 1..215: note = Ab0223 LC

SEQ ID NO: 3267 - protein, 250 aa, synthetic construct
  REGION 1..250: note = Ab0223 HC
QVQLVQSGAEVKKPGASVKVSCKASGYTFTSYWMHWVRQAPGQGLEWMGIIHPNSGGTSYAQKFQGRVTMTRDTSTSTVYMELSSLRSEDTAVYYCAMGDYVSRDYWGQGTLVTVSSASTKGPSVFPLAPSSKSTSGGTAALGCLVKDYFPEPVTVSWNSGALTSGVHTFPAVLQSSGLYSLSSVVTVPSSSLGTQTYICNVNHKPSNTKVDKKVEPKSCGGGGSHHHHHHGGGGSGLNDIFEAQKIEWH

SEQ ID NO: 3268 - protein, 215 aa, synthetic construct; identical to SEQ ID NO: 484
  REGION 1..215: note = Ab0785 LC

SEQ ID NO: 3269 - protein, 250 aa, synthetic construct
  REGION 1..250: note = Ab0785 HC
QVQLVQSGAEVKKPGASVKVSCKASGYTFTSYWMHWVRQHPGQGLEWMGIIHPNSGGTSYAQKFQGRVTMTRDTSTSTVYMELSSLRSEDTAVYYCAMGDYVSRDYWGQGTLVTVSSASTKGPSVFPLAPSSKSTSGGTAALGCLVKDYFPEPVTVSWNSGALTSGVHTFPAVLQSSGLYSLSSVVTVPSSSLGTQTYICNVNHKPSNTKVDKKVEPKSCGGGGSHHHHHHGGGGSGLNDIFEAQKIEWH

SEQ ID NO: 3270 - protein, 215 aa, synthetic construct; identical to SEQ ID NO: 484
  REGION 1..215: note = Ab0786 LC

SEQ ID NO: 3271 - protein, 250 aa, synthetic construct
  REGION 1..250: note = Ab0786 HC
QVQLVQSGAEVKKPGASVKVSCKASGYTFTSYWMHWVRQHPGQGLEWMGMIHPNSGGTNYAQKFQGRVTMTRDTSTSTVYMELSSLRSEDTAVYYCAMGDYVSRDYWGQGTLVTVSSASTKGPSVFPLAPSSKSTSGGTAALGCLVKDYFPEPVTVSWNSGALTSGVHTFPAVLQSSGLYSLSSVVTVPSSSLGTQTYICNVNHKPSNTKVDKKVEPKSCGGGGSHHHHHHGGGGSGLNDIFEAQKIEWH

SEQ ID NO: 3272 - protein, 215 aa, synthetic construct; identical to SEQ ID NO: 484
  REGION 1..215: note = Ab0787 LC

SEQ ID NO: 3273 - protein, 250 aa, synthetic construct
  REGION 1..250: note = Ab0787 HC
QVQLVQSGAEVKKPGASVKVSCKASGYTFTSYWMHWVRQHPGQGLEWMGMIHPNSGGTSYAQKFQGRVTMTRDTSTSTVYMELSSLRSEDTAVYYCAMGDYVSRDYWGQGTLVTVSSASTKGPSVFPLAPSSKSTSGGTAALGCLVKDYFPEPVTVSWNSGALTSGVHTFPAVLQSSGLYSLSSVVTVPSSSLGTQTYICNVNHKPSNTKVDKKVEPKSCGGGGSHHHHHHGGGGSGLNDIFEAQKIEWH

SEQ ID NO: 3274 - protein, 20 aa, synthetic construct
  REGION 1..20: note = linker
  SITE 1..20: note = This sequence may encompass 1-10 "Gly Ser" repeating units
GSGSGSGSGSGSGSGSGSGS

SEQ ID NO: 3275 - protein, 30 aa, synthetic construct
  REGION 1..30: note = linker
  SITE 1..30: note = This sequence may encompass 1-10 "Gly Gly Ser" repeating units
GGSGGSGGSGGSGGSGGSGGSGGSGGSGGS

SEQ ID NO: 3276 - protein, 40 aa, synthetic construct
  REGION 1..40: note = linker
  SITE 1..40: note = This sequence may encompass 1-10 "Gly Gly Gly Ser" repeating units
GGGSGGGSGGGSGGGSGGGSGGGSGGGSGGGSGGGSGGGS

SEQ ID NO: 3277 - protein, 40 aa, synthetic construct
  REGION 1..40: note = linker
  SITE 1..40: note = This sequence may encompass 1-10 "Gly Gly Ser Gly" repeating units
GGSGGGSGGGSGGGSGGGSGGGSGGGSGGGSGGGSGGGSG

SEQ ID NO: 3278 - protein, 50 aa, synthetic construct
  REGION 1..50: note = linker
  SITE 1..50: note = This sequence may encompass 1-10 "Gly Gly Ser Gly Gly" repeating units
GGSGGGGSGGGGSGGGGSGGGGSGGGGSGGGGSGGGGSGGGGSGGGGSGG

SEQ ID NO: 3279 - protein, 50 aa, synthetic construct
  REGION 1..50: note = linker
  SITE 1..50: note = This sequence may encompass 1-10 "Gly Gly Gly Gly Ser" repeating units
GGGGSGGGGSGGGGSGGGGSGGGGSGGGGSGGGGSGGGGSGGGGSGGGGS

SEQ ID NO: 3280 - protein, 20 aa, synthetic construct
  REGION 1..20: note = linker
GGGGSGGGGSGGGGSGGGGS

SEQ ID NO: 3281 - protein, 15 aa, synthetic construct
  REGION 1..15: note = linker
GGGGSGGGGSGGGGS

SEQ ID NO: 3282 - protein, 15 aa, synthetic construct
  REGION 1..15: note = linker
GGGGSGGGGSGGGGS

SEQ ID NO: 3283 - protein, 20 aa, synthetic construct
  REGION 1..20: note = linker
GGGGSGGGGSGGGGSGGGGS

SEQ ID NO: 3284 - protein, 14 aa, synthetic construct
  REGION 1..14: note = linker
GGSGGSGGSGGSGG

SEQ ID NO: 3285 - protein, 8 aa, synthetic construct
  REGION 1..8: note = CDR_H1 P7-F7
GYTFTSYW

SEQ ID NO: 3286 - protein, 8 aa, synthetic construct
  REGION 1..8: note = CDR_H2 P7-F7
IHPNSGSS

SEQ ID NO: 3287 - protein, 11 aa, synthetic construct
  REGION 1..11: note = CDR_H3 P7-F7
AFGDYEGGTDY

SEQ ID NO: 3288 - protein, 5 aa, synthetic construct
  REGION 1..5: note = CDR_L1 P7-F7
SSVTY

SEQ ID NO: 3289 - skipped

SEQ ID NO: 3290 - protein, 9 aa, synthetic construct
  REGION 1..9: note = CDR_L3 P7-F7
QQGGSLPFT

SEQ ID NO: 3291 - DNA, 717 bp, synthetic construct
  misc_feature 1..717: note = DNA P7-F7
  source 1..717: mol_type = other DNA
gaggtccaactgcagcagcctggggctgaactggtaaagcctggggcttcagtgaagttgtcctgcaaggcttctggctacactttcaccagctactggatgcactgggtgaagcagaggcctggacaaggccttgagtggattggaatgattcatcctaatagtggtagttctttctacaatgagaagttcaagaacaaggccacactgactgtagacaaatcctccagcacagcctacatgcaactcagcagcctgacatctgaggactctgcggtctattactgtgcctttggtgactacgaaggtgggacggactactggggccaaggcaccactctcacagtctcctcagggtcgacaaagctagaagaaggtgaattttcagaagcatccggacaaattgttctcacccagtctccagcaatcatagctgcatctcctggggagaaggtcaccatcacctgcagtgccagctcaagtgtaacttacatgaactggtaccagcagaaaccaggatcctcccccaaaatatggatttatggtatatccaacctggcttctggagtccctgctcgcttcagtggcagtgggtctgggacctcttactctctcacaattggcaccatggaggctgaagatgttgcctcttactactgccagcagggtggtagtctaccattcacgttcggctcggggaccaagctggagctgaaa

SEQ ID NO: 3292 - protein, 118 aa, synthetic construct
  REGION 1..118: note = VH P7-F7
EVQLQQPGAELVKPGASVKLSCKASGYTFTSYWMHWVKQRPGQGLEWIGMIHPNSGSSFYNEKFKNKATLTVDKSSSTAYMQLSSLTSEDSAVYYCAFGDYEGGTDYWGQGTTLTVSS

SEQ ID NO: 3293 - protein, 106 aa, synthetic construct
  REGION 1..106: note = VK P7-F7
QIVLTQSPAIIAASPGEKVTITCSASSSVTYMNWYQQKPGSSPKIWIYGISNLASGVPARFSGSGSGTSYSLTIGTMEAEDVASYYCQQGGSLPFTFGSGTKLELK

SEQ ID NO: 3294 - protein, 8 aa, synthetic construct
  REGION 1..8: note = CDR_H1 P7-E7
GYTFTSYW

SEQ ID NO: 3295 - protein, 8 aa, synthetic construct
  REGION 1..8: note = CDR_H2 P7-E7
IHPNSGAT

SEQ ID NO: 3296 - protein, 11 aa, synthetic construct
  REGION 1..11: note = CDR_H3 P7-E7
AFGDYGSRSDY

SEQ ID NO: 3297 - protein, 5 aa, synthetic construct
  REGION 1..5: note = CDR_L1 P7-E7
SSVSY

SEQ ID NO: 3298 - skipped

SEQ ID NO: 3299 - protein, 10 aa, synthetic construct
  REGION 1..10: note = CDR_L3 P7-E7
QQYSGYPLYT

SEQ ID NO: 3300 - DNA, 720 bp, synthetic construct
  misc_feature 1..720: note = DNA P7-E7
  source 1..720: mol_type = other DNA
gaggtccaactgcagcagcctggggctgagctggtaaagcctgggacttcagtgaagttgtcctgcaaggcttctggctacactttcaccagctactggatgcactgggtgaagcagaggcctggacaaggccttgagtggattggaatgattcatcctaatagtggtgctactaactacaatgagaagttcaagagcaaggccacactgactgtagacaaatcctccagcacagcctacatgcaactcagcagcctgacatctgaggactctgcggtctattactgtgccttcggggactacggtagtaggtctgactactggggccaaggcaccagtctcacagtctcctcagggtcgacaaagcttgaagaaggtgaattttcagaagcatccggacaaattgttctcacccagtctccagtaatcatgtctgcatctccaggggagaaggtcaccataacctgcagtgccagctcaagtgtaagttacatgcactggtaccagcagaagtcaggtgcctcccccaaactctggatttatagcacatccaacttggcttctggagtccctgctcgcttcagtggcagtgggtctgggacctcttactctctcacaatcagcagtgtggaggctgaagatgctgccacttattactgccagcagtacagtggttacccactttacacgttcggaggggggaccaagctggaaatgaaa

SEQ ID NO: 3301 - protein, 118 aa, synthetic construct
  REGION 1..118: note = VH P7-E7
EVQLQQPGAELVKPGTSVKLSCKASGYTFTSYWMHWVKQRPGQGLEWIGMIHPNSGATNYNEKFKSKATLTVDKSSSTAYMQLSSLTSEDSAVYYCAFGDYGSRSDYWGQGTSLTVSS

SEQ ID NO: 3302 - protein, 107 aa, synthetic construct
  REGION 1..107: note = VK P7-E7
QIVLTQSPVIMSASPGEKVTITCSASSSVSYMHWYQQKSGASPKLWIYSTSNLASGVPARFSGSGSGTSYSLTISSVEAEDAATYYCQQYSGYPLYTFGGGTKLEMK

SEQ ID NO: 3303 - protein, 8 aa, synthetic construct
  REGION 1..8: note = CDR_H1 P5-H5
GYTFTSYW

SEQ ID NO: 3304 - protein, 8 aa, synthetic construct
  REGION 1..8: note = CDR_H2 P5-H5
IHPNSGGT

SEQ ID NO: 3305 - protein, 10 aa, synthetic construct
  REGION 1..10: note = CDR_H3 P5-H5
AMGDYVSRDY

SEQ ID NO: 3306 - protein, 7 aa, synthetic construct
  REGION 1..7: note = CDR_L1 P5-H5
SSVSSSY

SEQ ID NO: 3307 - skipped

SEQ ID NO: 3308 - protein, 9 aa, synthetic construct
  REGION 1..9: note = CDR_L3 P5-H5
QQYSGYLFT

SEQ ID NO: 3309 - DNA, 720 bp, synthetic construct
  misc_feature 1..720: note = DNA P5-H5
  source 1..720: mol_type = other DNA
gaggtccaactgcagcagcctggggctgagcttgtgaagcctggggcttcagtgaagttgtcctgcaaggcttctggctacactttcaccagctactggatgcactgggtgaagcagaggcctggacaaggccttgagtggattggaatgattcatcctaatagtggtggtactaactacaatgagaagttcaagagcaaggccacactgactgtagacaaatcctccagcacagcctacatgcaactcagcagcctgacatctgaggactctgcggtctattactgtgcaatgggtgactacgttagtagagactactggggccaaggcaccactctcacagtctcctcagggtcgacaaagcttgaagaaggtgaattttcagaagcatccggagaaattgtgctcacccagtctccagcaatcatgtctgcatctccaggggaaaaggtcaccatgacctgcagggccagctcaagtgtaagttccagttacttgcactggtaccagcagaagtcaggtgcctcccccaaactctggatttatagcacatccaacttggcttctggagtccctgctcgcttcagtggcagtgggtctgggacctcttattctctcacaatcagcagcatggaggctgaagatgctgccacttactactgccagcagtacagtggttacctattcacgttcggtgctgggaccaagctggagctgaaa

SEQ ID NO: 3310 - protein, 117 aa, synthetic construct
  REGION 1..117: note = VH P5-H5
EVQLQQPGAELVKPGASVKLSCKASGYTFTSYWMHWVKQRPGQGLEWIGMIHPNSGGTNYNEKFKSKATLTVDKSSSTAYMQLSSLTSEDSAVYYCAMGDYVSRDYWGQGTTLTVSS

SEQ ID NO: 3311 - protein, 108 aa, synthetic construct
  REGION 1..108: note = VK P5-H5
EIVLTQSPAIMSASPGEKVTMTCRASSSVSSSYLHWYQQKSGASPKLWIYSTSNLASGVPARFSGSGSGTSYSLTISSMEAEDAATYYCQQYSGYLFTFGAGTKLELK

SEQ ID NO: 3312 - protein, 9 aa, synthetic construct
  REGION 1..9: note = CDR_H1 P2-D8
GYSITSGHY

SEQ ID NO: 3313 - protein, 7 aa, synthetic construct
  REGION 1..7: note = CDR_H2 P2-D8
ISYGGSN

SEQ ID NO: 3314 - protein, 6 aa, synthetic construct
  REGION 1..6: note = CDR_H3 P2-D8
ARDDGY

SEQ ID NO: 3315 - protein, 6 aa, synthetic construct
  REGION 1..6: note = CDR_L1 P2-D8
QNVGTA

SEQ ID NO: 3316 - skipped

SEQ ID NO: 3317 - protein, 9 aa, synthetic construct
  REGION 1..9: note = CDR_L3 P2-D8
QQGRKVPYT

SEQ ID NO: 3318 - DNA, 705 bp, synthetic construct
  misc_feature 1..705: note = DNA P2-D8
  source 1..705: mol_type = other DNA
gatgtgcagcttcaggagtcaggacctggcctcgtgaaaccttctcagtctctgtctctcacctgctctgtcactggctactccatcaccagtggtcattactggcactggatccggcagtttccaggaaacaaactggaatggatgggctacataagttacggtggtagcaataactacaacccatctctcaaaaatcgaatctccatcactcgtgacacatctaagaaccagtttttcctgaagttgaattctgtgactactgaggacacagccacatattactgtgcaagggatgatggttactggggccaagggaccacggtcaccgtctcctcagggtcgacaaagcttgaagaaggtgaattttcagaagcatccggagacattgtgctgacacaatctcaaaaattcatgtccacaacagtaggagacagggtcagcatcacctgcaaggccagtcagaatgtgggtactgctgtagcctggtatcaacagaaaccaggacagccacccaaactcctcatctatcttgcatccaacctagaatctgggatccctgccaggttcagtggcagtgggtctaggacagacttcaccctcaccattaatcctgtggaggaggatgatattgcaatgtatttctgtcagcaaggtaggaaggttccgtacacgttcgggtcggggaccaagctggaaatcaat

SEQ ID NO: 3319 - protein, 113 aa, synthetic construct
  REGION 1..113: note = VH P2-D8
DVQLQESGPGLVKPSQSLSLTCSVTGYSITSGHYWHWIRQFPGNKLEWMGYISYGGSNNYNPSLKNRISITRDTSKNQFFLKLNSVTTEDTATYYCARDDGYWGQGTTVTVSS

SEQ ID NO: 3320 - protein, 107 aa, synthetic construct
  REGION 1..107: note = VK P2-D8
DIVLTQSQKFMSTTVGDRVSITCKASQNVGTAVAWYQQKPGQPPKLLIYLASNLESGIPARFSGSGSRTDFTLTINPVEEDDIAMYFCQQGRKVPYTFGSGTKLEIN

SEQ ID NO: 3321 - protein, 9 aa, synthetic construct
  REGION 1..9: note = CDR_H1 P3-E12
GYSITSGHY

SEQ ID NO: 3322 - protein, 7 aa, synthetic construct
  REGION 1..7: note = CDR_H2 P3-E12
ISYGGSN

SEQ ID NO: 3323 - protein, 6 aa, synthetic construct
  REGION 1..6: note = CDR_H3 P3-E12
ARDDGY

SEQ ID NO: 3324 - protein, 7 aa, synthetic construct
  REGION 1..7: note = CDR_L1 P3-E12
SSISSNY

SEQ ID NO: 3325 - skipped

SEQ ID NO: 3326 - protein, 9 aa, synthetic construct
  REGION 1..9: note = CDR_L3 P3-E12
QQGSSIPFT

SEQ ID NO: 3327 - DNA, 708 bp, synthetic construct
  misc_feature 1..708: note = DNA P3-E12
  source 1..708: mol_type = other DNA
gatgtgcagcttcaggagtcaggacctggcctcgtgaaaccttctcagtctctgtctctcacctgctctgtcactggctactccatcaccagtggtcattactggcactggatccggcagtttccaggaaacaaactggaatggatgggctacataagttacggtggtagcaataactacaacccatctctcaaaaatcgaatctccatcactcgtgacacatctaagaaccagtttttcctgaagttgaattctgtgactactgaggacacagccacatattactgtgcaagggatgatggttactggggccaagggactctggtcactgtctctgcagggtcgacaaagcttgaagaaggtgaattttcagaagcatccggacaaattgttctcacccagtctccaaccaccatggctgcatctcccggggagaagatcactatcacctgcagtgccagctcaagtataagttccaattacttgcattggtatcagcagaagccaggattctcccctaaactcttgatttataggacatccaatctggcttctggagtcccagctcgcttcagtggcagtgggtctgggacctcttactctctcacaattggcaccatggaggctgaagatgttgccacttactactgccagcagggtagtagtataccattcacgttcggctcggggacaaagttggaaataaaa

SEQ ID NO: 3328 - protein, 113 aa, synthetic construct
  REGION 1..113: note = VH P3-E12
DVQLQESGPGLVKPSQSLSLTCSVTGYSITSGHYWHWIRQFPGNKLEWMGYISYGGSNNYNPSLKNRISITRDTSKNQFFLKLNSVTTEDTATYYCARDDGYWGQGTLVTVSA

SEQ ID NO: 3329 - protein, 108 aa, synthetic construct
  REGION 1..108: note = VK P3-E12
QIVLTQSPTTMAASPGEKITITCSASSSISSNYLHWYQQKPGFSPKLLIYRTSNLASGVPARFSGSGSGTSYSLTIGTMEAEDVATYYCQQGSSIPFTFGSGTKLEIK

SEQ ID NO: 3330 - protein, 9 aa, synthetic construct
  REGION 1..9: note = CDR_H1 P6-C8
GYSITSGHY

SEQ ID NO: 3331 - protein, 7 aa, synthetic construct
  REGION 1..7: note = CDR_H2 P6-C8
ISYGGSN

SEQ ID NO: 3332 - protein, 6 aa, synthetic construct
  REGION 1..6: note = CDR_H3 P6-C8
ARDDGY

SEQ ID NO: 3333 - protein, 7 aa, synthetic construct
  REGION 1..7: note = CDR_L1 P6-C8
SSISSNY

SEQ ID NO: 3334 - skipped

SEQ ID NO: 3335 - protein, 9 aa, synthetic construct
  REGION 1..9: note = CDR_L3 P6-C8
QQGSSIPFT

SEQ ID NO: 3336 - DNA, 708 bp, synthetic construct
  misc_feature 1..708: note = DNA P6-C8
  source 1..708: mol_type = other DNA
gatgtgcagcttcaggagtcaggacctggcctcgtgaaaccttctcagtctctgtctctcacctgctctgtcactggctattccatcaccagtggtcattactggaactggatccggcagtttccaggaaacaaactggaatggatgggctacataagctacggtggtagtaataactacaacccatctctcaaaaatcgaatctccatcactcgtgacacatctaagaaccagtttttcctgaagttgaattctgtgactactgaggacacagccacatattactgtgcaagggatgatggttactggggccaagggactctggtcactgtctctgcagggtcgacaaagcttgaagaaggtgaattttcagaagcatccggagaaattgtgctcacccagtctccagcaatcatgtctgcatctcccggggagaagatcactatcacctgcagtgccagctcaagtataagttccaattacttgcattggtatcagcagaagccaggattctcccctaaactcttgatttataggacatccaatctggcttctggagtcccagctcgcttcagtggcagtgggtctgggacctcttactctctcacaattggcaccatggaggctgaagatgttgccacttactactgccagcagggtagtagtataccattcacgttcggctcggggacaaagttggaaataaaa

SEQ ID NO: 3337 - protein, 113 aa, synthetic construct
  REGION 1..113: note = VH P6-C8
DVQLQESGPGLVKPSQSLSLTCSVTGYSITSGHYWNWIRQFPGNKLEWMGYISYGGSNNYNPSLKNRISITRDTSKNQFFLKLNSVTTEDTATYYCARDDGYWGQGTLVTVSA

SEQ ID NO: 3338 - protein, 108 aa, synthetic construct
  REGION 1..108: note = VK P6-C8
EIVLTQSPAIMSASPGEKITITCSASSSISSNYLHWYQQKPGFSPKLLIYRTSNLASGVPARFSGSGSGTSYSLTIGTMEAEDVATYYCQQGSSIPFTFGSGTKLEIK

SEQ ID NO: 3339 - protein, 9 aa, synthetic construct
  REGION 1..9: note = CDR_H1 P7-G8
GYSITSGHY

SEQ ID NO: 3340 - protein, 7 aa, synthetic construct
  REGION 1..7: note = CDR_H2 P7-G8
ISYGGSN

SEQ ID NO: 3341 - protein, 6 aa, synthetic construct
  REGION 1..6: note = CDR_H3 P7-G8
ARDDGY

SEQ ID NO: 3342 - protein, 7 aa, synthetic construct
  REGION 1..7: note = CDR_L1 P7-G8
SSISSNY

SEQ ID NO: 3343 - skipped

SEQ ID NO: 3344 - protein, 9 aa, synthetic construct
  REGION 1..9: note = CDR_L3 P7-G8
QQGSSIPYT

SEQ ID NO: 3345 - DNA, 708 bp, synthetic construct
  misc_feature 1..708: note = DNA P7-G8
  source 1..708: mol_type = other DNA
gatgtgcagcttcaggagtcaggacctggcctcgtgaaaccttctcagtctctgtctctcacctgctctgtcactggctattccatcaccagtggtcattactggaactggatccggcagtttccaggaaacaaactggaatggatgggctacataagctacggtggtagtaataactacaacccatctctcaaaaatcgaatctccatcactcgtgacacatctaagaaccagtttttcctgaagttgaattctgtgactactgaggacacagccacatattactgtgcaagggatgatggttactggggccaagggactctggtcactgtctctgcagggtcgacaaagcttgaagaaggtgaattttcagaagcatccggagacattgtgctgacacaatctccaaccaccatggctgcatctcccggggagaagatcactatcacctgcagtgccagctcaagtataagttccaattacttgcattggtatcagcagaagccaggattctcccctaaactcttgatttataggacatccaatctggcttctggagtcccagctcgcttcagtggcagtgggtctgggacctcttactctctcacaattggcaccatggaggctgaagatgttgccacttactactgccagcagggtagtagtataccgtacacgttcggaggggggaccaagctggaaatgaaa

SEQ ID NO: 3346 - protein, 113 aa, synthetic construct; identical to SEQ ID NO: 3337
  REGION 1..113: note = VH P7-G8

SEQ ID NO: 3347 - protein, 108 aa, synthetic construct
  REGION 1..108: note = VK P7-G8
DIVLTQSPTTMAASPGEKITITCSASSSISSNYLHWYQQKPGFSPKLLIYRTSNLASGVPARFSGSGSGTSYSLTIGTMEAEDVATYYCQQGSSIPYTFGGGTKLEMK

SEQ ID NO: 3348 - protein, 9 aa, synthetic construct
  REGION 1..9: note = CDR_H1 P6-D7
GDSITSGYS

SEQ ID NO: 3349 - protein, 7 aa, synthetic construct
  REGION 1..7: note = CDR_H2 P6-D7
IHYSGST

SEQ ID NO: 3350 - protein, 6 aa, synthetic construct
  REGION 1..6: note = CDR_H3 P6-D7
ARFDGY

SEQ ID NO: 3351 - protein, 7 aa, synthetic construct
  REGION 1..7: note = CDR_L1 P6-D7
SSISSNY

SEQ ID NO: 3352 - skipped

SEQ ID NO: 3353 - protein, 9 aa, synthetic construct
  REGION 1..9: note = CDR_L3 P6-D7
QQGSSIPFT

SEQ ID NO: 3354 - DNA, 708 bp, synthetic construct
  misc_feature 1..708: note = DNA P6-D7
  source 1..708: mol_type = other DNA
gatgtgcagcttcaggagtcaggacctgacctggtaaaaccttctcagtcactttcactcacctgcactgtcactggcgactccatcaccagtggttatagctggcactggatccggcagtttccaggaaacaaactggaatggatgggctacatacactacagtggtagcactaactacaacccatctctcaaaagtcgaatctctatcactcgagacacatccaagaaccagttcttcctgcagttgaattctgtgactactgaggacacagccacatattactgtgcaagattcgatggttactggggccaagggactctggtcactgtctctgcagggtcgacaaagcttgaagaaggtgaattttcagaagcatccggagacattgtgctgacccagtctccaaccaccatggctgcatctcccggggagaagatcactatcacctgcagtgccagctcaagtataagttccaattacttgcattggtatcagcagaagccaggattctcccctaaactcttgatttataggacatccaatctggcttctggagtcccagctcgcttcagtggcagtgggtctgggacctcttactctctcacaattggcaccatggaggctgaagatgttgccacttactactgccagcagggtagtagtataccattcacgttcggctcgggcaccaagctggagctgaaa

SEQ ID NO: 3355 - protein, 113 aa, synthetic construct
  REGION 1..113: note = VH P6-D7
DVQLQESGPDLVKPSQSLSLTCTVTGDSITSGYSWHWIRQFPGNKLEWMGYIHYSGSTNYNPSLKSRISITRDTSKNQFFLQLNSVTTEDTATYYCARFDGYWGQGTLVTVSA

SEQ ID NO: 3356 - protein, 108 aa, synthetic construct
  REGION 1..108: note = VK P6-D7
DIVLTQSPTTMAASPGEKITITCSASSSISSNYLHWYQQKPGFSPKLLIYRTSNLASGVPARFSGSGSGTSYSLTIGTMEAEDVATYYCQQGSSIPFTFGSGTKLELK

SEQ ID NO: 3357 - protein, 9 aa, synthetic construct
  REGION 1..9: note = CDR_H1 P6-D5
GDSITSGYS

SEQ ID NO: 3358 - protein, 7 aa, synthetic construct
  REGION 1..7: note = CDR_H2 P6-D5
IHYSGST

SEQ ID NO: 3359 - protein, 6 aa, synthetic construct
  REGION 1..6: note = CDR_H3 P6-D5
ARFDGY

SEQ ID NO: 3360 - protein, 7 aa, synthetic construct
  REGION 1..7: note = CDR_L1 P6-D5
SSISSNY

SEQ ID NO: 3361 - skipped

SEQ ID NO: 3362 - protein, 9 aa, synthetic construct
  REGION 1..9: note = CDR_L3 P6-D5
QQGSSIPYT

SEQ ID NO: 3363 - DNA, 708 bp, synthetic construct
  misc_feature 1..708: note = DNA P6-D5
  source 1..708: mol_type = other DNA
gatgtgcagcttcaggagtcgggacctggcctggtgaaaccttctcagtcactttcactcacctgcactgtcactggcgactccatcaccagtggttatagctggcactggatccggcagtttccaggaaacaaactggaatggatgggctacatacactacagtggtagcactaactacaacccatctctcaaaagtcgaatctctatcactcgagacacatccaagaaccagttcttcctgcagttgaattctgtgactactgaggacacagccacatattactgtgcaagattcgatggttactggggccaagggactctggtcactgtctctgcagggtcgacaaagcttgaagaaggtgaattttcagaagcatccggagaaaatgtgctcacccagtctccaaccaccatggctgcatctcccggggagaagatcactatcacctgcagtgccagctcaagtataagttccaattacttgcattggtatcagcagaagccaggattctcccctaaactcttgctttataggacatccaatctggcttctggagtcccagctcgcttcagtggcagtgggtctgggacctcttactctctcacaattggcaccatggaggctgaagatgttgccacttactactgccagcagggtagtagtataccgtacacgttcggaggggggaccaagctggaaatgaaa

SEQ ID NO: 3364 - protein, 112 aa, synthetic construct
  REGION 1..112: note = VH P6-D5
DVQLQESGPGLVKPSQSLSLTCTVTGDSITSGYSWHWIRQFPGNKLEWMGYIHYSGSTNYNPSLKSRISITRDTSKNQFFLQLNSVTTEDTATYYCARFDGYWGQGTLVTVS

SEQ ID NO: 3365 - protein, 108 aa, synthetic construct; identical to SEQ ID NO: 3356
  REGION 1..108: note = VK P6-D5

SEQ ID NO: 3366 - protein, 8 aa, synthetic construct
  REGION 1..8: note = CDR_H1 P3-A11
GFTFSDAW

SEQ ID NO: 3367 - protein, 10 aa, synthetic construct
  REGION 1..10: note = CDR_H2 P3-A11
IRNKANNHAT

SEQ ID NO: 3368 - protein, 6 aa, synthetic construct
  REGION 1..6: note = CDR_H3 P3-A11
ARGDGY

SEQ ID NO: 3369 - protein, 6 aa, synthetic construct
  REGION 1..6: note = CDR_L1 P3-A11
QDVGTA

SEQ ID NO: 3370 - skipped

SEQ ID NO: 3371 - protein, 9 aa, synthetic construct
  REGION 1..9: note = CDR_L3 P3-A11
QQYSSSPWT

SEQ ID NO: 3372 - DNA, 711 bp, synthetic construct
  misc_feature 1..711: note = DNA P3-A11
  source 1..711: mol_type = other DNA
gaagtgaagcttgaggagtctggaggaggcttggtgcaacctggaggatccatgaaactctcttgtgctgcctctggattcacttttagtgacgcctggatggaatgggtccgccagtctccagagaaggggcttgagtgggttgctgaaattagaaacaaagctaataatcatgcaacatactatgctgagtctgtgaaagggaggttcgccatttcaagagatgattccaaaagtagtgtctacctgcaaatgaacagcttaagacctgaagacactggcatttattactgtgccaggggggacggctactggggccaaggcaccactctcacagtctcctcagggtcgacaaagcttgaagaaggtgaattttcagaagcatccggagacattgtgctgacccaatctcaaaaattcatgtccacagcagtaggagacagggtcagcatcacctgcaaggccagtcaggatgtgggtactgctgtagcctggtatcaacagaaaccagggcaatctcctaaactactgatttactgggcatccacccggcacactggagtccctgatcgcttcacaggcagtggatctgggacagatttcactctcaccattagcaatgtgcagtctgaagacttggcagattatttctgtcagcaatatagcagctctccgtggacgttcggtggaggcaccaagctggaaatcaat

SEQ ID NO: 3373 - protein, 115 aa, synthetic construct
  REGION 1..115: note = VH P3-A11
EVKLEESGGGLVQPGGSMKLSCAASGFTFSDAWMEWVRQSPEKGLEWVAEIRNKANNHATYYAESVKGRFAISRDDSKSSVYLQMNSLRPEDTGIYYCARGDGYWGQGTTLTVSS

SEQ ID NO: 3374 - protein, 107 aa, synthetic construct
  REGION 1..107: note = VK P3-A11
DIVLTQSQKFMSTAVGDRVSITCKASQDVGTAVAWYQQKPGQSPKLLIYWASTRHTGVPDRFTGSGSGTDFTLTISNVQSEDLADYFCQQYSSSPWTFGGGTKLEIN

SEQ ID NO: 3375 - protein, 8 aa, synthetic construct
  REGION 1..8: note = CDR_H1 P5-C3
GYTFTNYW

SEQ ID NO: 3376 - protein, 8 aa, synthetic construct
  REGION 1..8: note = CDR_H2 P5-C3
INPSNGGT

SEQ ID NO: 3377 - protein, 11 aa, synthetic construct
  REGION 1..11: note = CDR_H3 P5-C3
ARGDYYARRDY

SEQ ID NO: 3378 - protein, 7 aa, synthetic construct
  REGION 1..7: note = CDR_L1 P5-C3
SSVSSSY

SEQ ID NO: 3379 - skipped

SEQ ID NO: 3380 - protein, 9 aa, synthetic construct
  REGION 1..9: note = CDR_L3 P5-C3
QQYSGYPLT

SEQ ID NO: 3381 - DNA, 723 bp, synthetic construct
  misc_feature 1..723: note = DNA P5-C3
  source 1..723: mol_type = other DNA
gaggtccaactgcagcagcctgggactgaactggtgaagcctggggcttcagtgaagctgtcctgcaaggcttctggctacaccttcaccaactactggatgcactgggtgaagcagaggcctggacgaggccttgagtggattggaaatattaatcctagcaatggtggtactaactacaatgagaagttcaagagcaaggccacactgactgtagacaaatcctccagcacagcctacatgcagctcagcagcctgacatctgaggactctgcggtctattactgtgcaagaggggattactacgctaggagggactactggggccaaggcaccagtctcacagtctcctcagggtcgacaaagcttgaagaaggtgaattttcagaagcatccggagaaaatgtgctcacccagtctccagcaatcatgtctgcatctccaggggaaaaggtcaccatgacctgcagggccagctcaagtgtaagttccagttacttgcactggtaccagcagaagtcaggtgcctcccccaaactctggatttatagcacatccaacttggcttctggagtccctgctcgcttcagtggcagtgggtctgggacctcttactctctcacaatcagcagtgtggaggctgaagatgctgccacttattactgccagcagtacagtggttacccactcacgttcggctcggggacaaagttggaaataaaa

SEQ ID NO: 3382 - protein, 118 aa, synthetic construct
  REGION 1..118: note = VH P5-C3
EVQLQQPGTELVKPGASVKLSCKASGYTFTNYWMHWVKQRPGRGLEWIGNINPSNGGTNYNEKFKSKATLTVDKSSSTAYMQLSSLTSEDSAVYYCARGDYYARRDYWGQGTSLTVSS

SEQ ID NO: 3383 - protein, 108 aa, synthetic construct
  REGION 1..108: note = VK P5-C3
ENVLTQSPAIMSASPGEKVTMTCRASSSVSSSYLHWYQQKSGASPKLWIYSTSNLASGVPARFSGSGSGTSYSLTISSVEAEDAATYYCQQYSGYPLTFGSGTKLEIK

SEQ ID NO: 3384 - protein, 8 aa, synthetic construct
  REGION 1..8: note = CDR_H1 P3-H5
GYTFTNSW

SEQ ID NO: 3385 - protein, 8 aa, synthetic construct
  REGION 1..8: note = CDR_H2 P3-H5
IDPSDSET

SEQ ID NO: 3386 - protein, 11 aa, synthetic construct
  REGION 1..11: note = CDR_H3 P3-H5
ARGDYYGRRDY

SEQ ID NO: 3387 - protein, 5 aa, synthetic construct
  REGION 1..5: note = CDR_L1 P3-H5
SSVSY

SEQ ID NO: 3388 - skipped

SEQ ID NO: 3389 - protein, 11 aa, synthetic construct
  REGION 1..11: note = CDR_L3 P3-H5
QQWSSYPPMYT

SEQ ID NO: 3390 - DNA, 723 bp, synthetic construct
  misc_feature 1..723: note = DNA P3-H5
  source 1..723: mol_type = other DNA
gaggtccaactgcagcagcctggggctgagctggtaaagcctggggcttcagtgaagatgtcctgcaaggcttctggctacaccttcaccaactcctggatgcattgggtgaagcagaggcctatacaaggccttgaatggattggtaacattgacccttctgatagtgaaactcactacaatcaaaagttcaaggacaaggccacattgactgtagacaaatcctccagcacagcctacatgcagctcagcagcctgacatctgaggactctgcggtctattactgtgcaagaggggattactacggtaggagggactactggggccaaggcaccagtctcacagtctcctcagggtcgacaaagcttgaagaaggtgaattttcagaagcatccggagaaaatgtgctcacccagtctccagcaatcatgtctgcatctccaggggagaaggtcaccatgacctgcagtgccagctcaagtgtaagttacatgtactggtaccagcagaagccaggatcctcccccagactcctgatttatgacacatccaacctggcttctggagtccctgttcgcttcagtggcagtgggtctgggacctcttactctctcacaatcagccgaatggaggctgaagatgctgccacttattactgccagcagtggagtagttacccacccatgtacacgttcggaggggggaccaagctggaaatgaaa

SEQ ID NO: 3391 - protein, 118 aa, synthetic construct
  REGION 1..118: note = VH P3-H5
EVQLQQPGAELVKPGASVKMSCKASGYTFTNSWMHWVKQRPIQGLEWIGNIDPSDSETHYNQKFKDKATLTVDKSSSTAYMQLSSLTSEDSAVYYCARGDYYGRRDYWGQGTSLTVSS

SEQ ID NO: 3392 - protein, 108 aa, synthetic construct
  REGION 1..108: note = VK P3-H5
ENVLTQSPAIMSASPGEKVTMTCSASSSVSYMYWYQQKPGSSPRLLIYDTSNLASGVPVRFSGSGSGTSYSLTISRMEAEDAATYYCQQWSSYPPMYTFGGGTKLEMK

SEQ ID NO: 3393 - protein, 8 aa, synthetic construct
  REGION 1..8: note = CDR_H1 P7-H10
GYTFTSYW

SEQ ID NO: 3394 - protein, 8 aa, synthetic construct
  REGION 1..8: note = CDR_H2 P7-H10
INPISANT

SEQ ID NO: 3395 - protein, 10 aa, synthetic construct
  REGION 1..10: note = CDR_H3 P7-H10
ARLEGPHFDY

SEQ ID NO: 3396 - protein, 5 aa, synthetic construct
  REGION 1..5: note = CDR_L1 P7-H10
SSVSP

SEQ ID NO: 3397 - skipped

SEQ ID NO: 3398 - protein, 9 aa, synthetic construct
  REGION 1..9: note = CDR_L3 P7-H10
FQGSGYPLT

SEQ ID NO: 3399 - DNA, 714 bp, synthetic construct
  misc_feature 1..714: note = DNA P7-H10
  source 1..714: mol_type = other DNA
gaggtccaactgcagcagcctggggctgagcttgtgaagcctggggcttcagtgaagttgtcctgcaaggcttctggctacaccttcaccagctactggatgcactggatgaagcagaggcctggacaaggccttgagtggattggctggattaatcctattagtgctaatactgagtacaatgagaagttcaagagcaaggccacactgactgtagacaaaccctccagcacagcctacatgcagctcagcagcctgacatctgaggactctgcggtctattattgtgcaagattggagggtcctcactttgactactggggccaaggcaccagtctcacagtctcctcagggtcgacaaagcttgaagaaggtgaattttcagaagcatccggagaaattgttctcacccagtctccagcaatcatgtctgcatctccaggggaaaaggtcaccatgacctgcagtgccagctcaagtgttagtcccatacactggtaccagcagaagtcaagcacctcccccaaactctggatttatgacacatccaaactggcttctggagtcccaggtcgcttcagtggcagtgggtctggaaactcttactctctcacgatcagcagcatggaggctgaagatgttgccacttattactgttttcaggggagtgggtacccactcacgttcggtactgggaccaagctggagctgaaa

SEQ ID NO: 3400 - protein, 117 aa, synthetic construct
  REGION 1..117: note = VH P7-H10
EVQLQQPGAELVKPGASVKLSCKASGYTFTSYWMHWMKQRPGQGLEWIGWINPISANTEYNEKFKSKATLTVDKPSSTAYMQLSSLTSEDSAVYYCARLEGPHFDYWGQGTSLTVSS

SEQ ID NO: 3401 - protein, 106 aa, synthetic construct
  REGION 1..106: note = VK P7-H10
EIVLTQSPAIMSASPGEKVTMTCSASSSVSPIHWYQQKSSTSPKLWIYDTSKLASGVPGRFSGSGSGNSYSLTISSMEAEDVATYYCFQGSGYPLTFGTGTKLELK

SEQ ID NO: 3402 - protein, 9 aa, synthetic construct
  REGION 1..9: note = CDR_H1 P7-C6
GYSITSDFA

SEQ ID NO: 3403 - protein, 7 aa, synthetic construct
  REGION 1..7: note = CDR_H2 P7-C6
VIYGDIT

SEQ ID NO: 3404 - protein, 11 aa, synthetic construct
  REGION 1..11: note = CDR_H3 P7-C6
ARSGYGGYFDV

SEQ ID NO: 3405 - protein, 9 aa, synthetic construct
  REGION 1..9: note = CDR_L1 P7-C6
TGAVTTSNY

SEQ ID NO: 3406 - skipped

SEQ ID NO: 3407 - protein, 9 aa, synthetic construct
  REGION 1..9: note = CDR_L3 P7-C6
ALWYSNHLV

SEQ ID NO: 3408 - DNA, 726 bp, synthetic construct
  misc_feature 1..726: note = DNA P7-C6
  source 1..726: mol_type = other DNA
gatgtgcagcttcaggagtcgggacctggcctggtgaaaccttctcagtctctgtccctcacctgcactgtcactggctactcaatcaccagtgattttgcctggaactggatccggcagtttccaggaaacaaactggagtggatgggctacgtaatctacggtgatatcactacctacaacccatctctcaaaagtcgaatctctatcactcgagacacatccaagaaccagttcttcctgcagttgaattctgtgactactgaggacacagccacatattactgtgcaagatcaggctacggggggtacttcgatgtctggggcgcagggaccacggtcaccgtctcctcagggtcgacaaagcttgaagaaggtgaattttcagaagcatccggacaggctgttgtgactcaggaatctgcactcaccacatcacctggtgaaacagtcacactcacttgtcgctcaagtactggggctgttacaactagtaactatgccaactgggtccaagaaaaaccagatcatttattcactggtctaataggtggtaccaacaaccgagctccaggtgttcctgccagattctcaggctccctgattggagacaaggctgccctcaccatcacaggggcacagactgaggatgaggcaatatatttctgtgctctatggtacagcaaccatttggtgttcggtggaggaaccaaactgactgtccta

SEQ ID NO: 3409 - protein, 118 aa, synthetic construct
  REGION 1..118: note = VH P7-C6
DVQLQESGPGLVKPSQSLSLTCTVTGYSITSDFAWNWIRQFPGNKLEWMGYVIYGDITTYNPSLKSRISITRDTSKNQFFLQLNSVTTEDTATYYCARSGYGGYFDVWGAGTTVTVSS

SEQ ID NO: 3410 - protein, 109 aa, synthetic construct
  REGION 1..109: note = VK P7-C6
QAVVTQESALTTSPGETVTLTCRSSTGAVTTSNYANWVQEKPDHLFTGLIGGTNNRAPGVPARFSGSLIGDKAALTITGAQTEDEAIYFCALWYSNHLVFGGGTKLTVL

SEQ ID NO: 3411 - protein, 8 aa, synthetic construct
  REGION 1..8: note = P2-C2 CDR_H1
GYTFTSYW

SEQ ID NO: 3412 - protein, 8 aa, synthetic construct
  REGION 1..8: note = CDR_H2 P2-C2
IDPNSGGT

SEQ ID NO: 3413 - protein, 9 aa, synthetic construct
  REGION 1..9: note = CDR_H3 P2-C2
ASGIYERDY

SEQ ID NO: 3414 - protein, 7 aa, synthetic construct
  REGION 1..7: note = CDR_L1 P2-C2
SSVSSSY

SEQ ID NO: 3415 - skipped

SEQ ID NO: 3416 - protein, 11 aa, synthetic construct
  REGION 1..11: note = CDR_L3 P2-C2
QQYSGYPSMYT

SEQ ID NO: 3417 - DNA, 723 bp, synthetic construct
  misc_feature 1..723: note = DNA P2-C2
  source 1..723: mol_type = other DNA
gaggtccaactgcagcagcctgggactgaactggtgaagcctggggcttcagtgaagctgtcctgcaaggcttctggctacaccttcaccagctactggatgcactgggtgaagcagaggcctggacgaggccttgagtggattggaaggattgatcctaatagtggtggtactaagtacaatgagaagttcaagagcaaggccacactgactgtagacaaaccctccagcacagcctacatgcagctcagcagcctgacatctgaggactctgcggtctattattgtgcaagtggcatctatgaaagggactactggggccaaggcaccagtctcacagtctcctcagggtcgacaaagcttgaagaaggtgaattttcagaagcatccggacaaattgttctcacccagtctccagcaatcatgtctgcatctcctggggaacgggtcaccatgacctgcagtgccagttcaagtgtaagttccagctacttgtactggtaccggcagaagccaggatcctcccccaaactatggatttatagcacatccaacctggcttctggagtccctgctcgcttcagtggcagtgggtctgggacctcttattctctcacaatcagcagcatggaggctgaagatgctgccacttattactgccagcagtacagtggttacccatccatgtatacgttcggatcggggaccaagctggaaatgaaa

SEQ ID NO: 3418 - protein, 116 aa, synthetic construct
  REGION 1..116: note = VH P2-C2
EVQLQQPGTELVKPGASVKLSCKASGYTFTSYWMHWVKQRPGRGLEWIGRIDPNSGGTKYNEKFKSKATLTVDKPSSTAYMQLSSLTSEDSAVYYCASGIYERDYWGQGTSLTVSS

SEQ ID NO: 3419 - protein, 110 aa, synthetic construct
  REGION 1..110: note = VK P2-C2
QIVLTQSPAIMSASPGERVTMTCSASSSVSSSYLYWYRQKPGSSPKLWIYSTSNLASGVPARFSGSGSGTSYSLTISSMEAEDAATYYCQQYSGYPSMYTFGSGTKLEMK

SEQ ID NO: 3420 - protein, 8 aa, synthetic construct
  REGION 1..8: note = CDR_H1 P2-E8
GYTFTSYW

SEQ ID NO: 3421 - protein, 8 aa, synthetic construct
  REGION 1..8: note = CDR_H2 P2-E8
IHPNSGTT

SEQ ID NO: 3422 - protein, 10 aa, synthetic construct
  REGION 1..10: note = CDR_H3 P2-E8
ASSDYSKRDY

SEQ ID NO: 3423 - protein, 7 aa, synthetic construct
  REGION 1..7: note = CDR_L1 P2-E8
SSISSNY

SEQ ID NO: 3424 - skipped

SEQ ID NO: 3425 - protein, 9 aa, synthetic construct
  REGION 1..9: note = CDR_L3 P2-E8
QQGSSIPVT

SEQ ID NO: 3426 - DNA, 720 bp, synthetic construct
  misc_feature 1..720: note = DNA P2-E8
  source 1..720: mol_type = other DNA
gaggtccaactgcagcagcctggggctgagctggtaaagcctggggcttcagtgaagttgtcctgcaaggcttctggctacactttcaccagctactggatgcactgggtgaagcagaggcctggacaaggccttgagtggattggaatgattcatcctaatagtggtactactaactacaatgagaagttcaagagcaaggccacactgactgtagacaaatcctccagcacagcctacatgcaactcagcagcctgacatctgaggactctgcggtctattactgtgcaagttcggactatagtaaaagggactactggggccaaggcaccagtctcacagtctcctcagggtcgacaaagcttgaagaaggtgaattttcagaagcatccggagacattgtgctgacacaatctccaaccaccatggctgcatctcccggggagaagatcactatcacctgcagtgccagctcaagtatcagttccaattacttgcattggtatcagcagaagccaggattctcccctaaactcttgatttttaggacatccaatctggcttctggggtcccagctcgcttcagtggcagtgggtctgggacctcttactctctcacaattggcaccatggaggctgaagatgttgccacttactactgccagcagggtagtagtataccggtcacgttcggtgctgggaccaagctggagctgaaa

SEQ ID NO: 3427 - protein, 117 aa, synthetic construct
  REGION 1..117: note = VH P2-E8
EVQLQQPGAELVKPGASVKLSCKASGYTFTSYWMHWVKQRPGQGLEWIGMIHPNSGTTNYNEKFKSKATLTVDKSSSTAYMQLSSLTSEDSAVYYCASSDYSKRDYWGQGTSLTVSS

SEQ ID NO: 3428 - protein, 108 aa, synthetic construct
  REGION 1..108: note = VK P2-E8
DIVLTQSPTTMAASPGEKITITCSASSSISSNYLHWYQQKPGFSPKLLIFRTSNLASGVPARFSGSGSGTSYSLTIGTMEAEDVATYYCQQGSSIPVTFGAGTKLELK

SEQ ID NO: 3429 - protein, 8 aa, synthetic construct
  REGION 1..8: note = CDR_H1 P5-E9
GDSITSGD

SEQ ID NO: 3430 - protein, 7 aa, synthetic construct
  REGION 1..7: note = CDR_H2 P5-E9
LSYSGST

SEQ ID NO: 3431 - protein, 14 aa, synthetic construct
  REGION 1..14: note = CDR_H3 P5-E9
ASSYSSNYVWYFDV

SEQ ID NO: 3432 - protein, 9 aa, synthetic construct
  REGION 1..9: note = CDR_L1 P5-E9
TGAITISNY

SEQ ID NO: 3433 - skipped

SEQ ID NO: 3434 - protein, 9 aa, synthetic construct
  REGION 1..9: note = CDR_L3 P5-E9
ALWYSNHWV

SEQ ID NO: 3435 - DNA, 732 bp, synthetic construct
  misc_feature 1..732: note = DNA P5-E9
  source 1..732: mol_type = other DNA
gatgtgcagcttcaggagtcaggacctagcctcgtgaaaccctctcagactctgtccctcacctgttttgtcactggcgactccatcaccagtggtgactggaactggatccggaaattcccagggaataaacttgagtacatggggtacctaagctacagtggtagcacttactacagtccatctctcaaaagtcgaatctccatcactcgagacacatccaagaaccagtactacctgcagttgaattctgtgactactgaggacacagccacatattactgtgcaagctcctactctagtaactacgtttggtacttcgatgtctggggcacagggaccacggtcaccgtctcctcagggtcgacaaagcttgaagaaggtgaattttcagaagcatccggacaggctgttgtgactcaggaatctgcactcaccacatcacctggtgaaacagtcacactcacttgtcgctcaagtactggggctattacaattagtaactatgccaactgggtccaagaaaaaccagatcatttattcactggtctaataggtggtaccaacaaccgagctccaggtgttcctgccagattctcaggctccctgattggagacaaggctgccctcaccatcacaggggcacagactgaggatgaggcaatatatttctgtgctctatggtacagcaaccattgggtgttcggtggaggaaccaaactgactgtccta

SEQ ID NO: 3436 - protein, 120 aa, synthetic construct
  REGION 1..120: note = VH P5-E9
DVQLQESGPSLVKPSQTLSLTCFVTGDSITSGDWNWIRKFPGNKLEYMGYLSYSGSTYYSPSLKSRISITRDTSKNQYYLQLNSVTTEDTATYYCASSYSSNYVWYFDVWGTGTTVTVSS

SEQ ID NO: 3437 - protein, 109 aa, synthetic construct
  REGION 1..109: note = VK P5-E9
QAVVTQESALTTSPGETVTLTCRSSTGAITISNYANWVQEKPDHLFTGLIGGTNNRAPGVPARFSGSLIGDKAALTITGAQTEDEAIYFCALWYSNHWVFGGGTKLTVL

SEQ ID NO: 3438 - protein, 8 aa, synthetic construct
  REGION 1..8: note = CDR_H1 P3-H7
GDSITSGD

SEQ ID NO: 3439 - protein, 7 aa, synthetic construct
  REGION 1..7: note = CDR_H2 P3-H7
LSYSGST

SEQ ID NO: 3440 - protein, 14 aa, synthetic construct
  REGION 1..14: note = CDR_H3 P3-H7
ASSYSSNYVWYFDV

SEQ ID NO: 3441 - protein, 9 aa, synthetic construct
  REGION 1..9: note = CDR_L1 P3-H7
TGAVTTSNY

SEQ ID NO: 3442 - skipped

SEQ ID NO: 3443 - protein, 9 aa, synthetic construct
  REGION 1..9: note = CDR_L3 P3-H7
ALWYSNHWV

SEQ ID NO: 3444 - DNA, 732 bp, synthetic construct
  misc_feature 1..732: note = DNA P3-H7
  source 1..732: mol_type = other DNA
gatgtgcagcttcaggagtcaggacctagcctcgtgaaaccctctcagactctgtccctcacctgttttgtcactggcgactccatcaccagtggtgactggaactggatccggaaattcccagggaataaacttgagtacatggggtacctaagctacagtggtagcacttactacagtccatctctcaaaagtcgaatctccatcactcgagacacatccaagaaccagtactacctgcagttgaattctgtgactactgaggacacagccacatattactgtgcaagctcctactctagtaactacgtttggtacttcgatgtctggggcacagggaccacggtcaccgtctcctcagggtcgacaaagcttgaagaaggtgaattttcagaagcatccggacaggctgttgtgactcaggaatctgcactcaccacatcacctggtgaaacagtcacactcacttgtcgctcaagtactggggctgttacaactagtaactatgccaactgggtccaagaaaaaccagatcatttattcactggtctaataggtggtaccaacaaccgagctccaggtgttcctgccagattctcaggctccctgattggagacaaggctgccctcaccatcacaggggcacagactgaggatgaggcaatatatttctgtgctctatggtacagcaaccattgggtgttcggtggaggaaccaaactgactgtccta

SEQ ID NO: 3445 - protein, 120 aa, synthetic construct; identical to SEQ ID NO: 3436
  REGION 1..120: note = VH P3-H7

SEQ ID NO: 3446 - protein, 109 aa, synthetic construct
  REGION 1..109: note = VK P3-H7
QAVVTQESALTTSPGETVTLTCRSSTGAVTTSNYANWVQEKPDHLFTGLIGGTNNRAPGVPARFSGSLIGDKAALTITGAQTEDEAIYFCALWYSNHWVFGGGTKLTVL

SEQ ID NO: 3447 - protein, 8 aa, synthetic construct
  REGION 1..8: note = CDR_H1 P7-D6
GDSITSGD

SEQ ID NO: 3448 - protein, 7 aa, synthetic construct
  REGION 1..7: note = CDR_H2 P7-D6
LSYSGST

SEQ ID NO: 3449 - protein, 14 aa, synthetic construct
  REGION 1..14: note = CDR_H3 P7-D6
ASSYSSNYVWYFDV

SEQ ID NO: 3450 - protein, 9 aa, synthetic construct
  REGION 1..9: note = CDR_L1 P7-D6
TGAVTTSNY

SEQ ID NO: 3451 - skipped

SEQ ID NO: 3452 - protein, 9 aa, synthetic construct
  REGION 1..9: note = CDR_L3 P7-D6
ALWYSNHWV

SEQ ID NO: 3453 - DNA, 732 bp, synthetic construct
  misc_feature 1..732: note = DNA P7-D6
  source 1..732: mol_type = other DNA
gatgtgcagcttcaggagtcaggacctagcctcgtgaaaccctctcagactctgtccctcacctgttttgtcactggcgactccatcaccagtggtgactggaactggatccggaaattcccagggaataaacttgagtacatggggtacctaagctacagtggtagcacttactacagtccatctctcaaaagtcgaatctccatcactcgagacacatccaagaaccagtactacctgcagttgaattctgtgactactgaggacacagccacatattactgtgcaagctcctactctagtaactacgtttggtacttcgatgtctggggcacaggaacctcagtcaccgtctcctcagggtcgacaaagcttgaagaaggtgaattttcagaagcatccggacaggctgttgtgactcaggaatctgcactcaccacatcacctggtgaaacagtcacactcacttgtcgctcaagtactggggctgttacaactagtaactatgccaactgggtccaagaaaaaccagatcatttattcactggtctaataggtggtaccaacaaccgagctccaggtgttcctgccagattctcaggctccctgattggagacaaggctgccctcaccatcacaggggcacagactgaggatgaggcaatatatttctgtgctctatggtacagcaaccactgggtgttcggtggaggaaccaaactgactgtccta

SEQ ID NO: 3454 - protein, 120 aa, synthetic construct
  REGION 1..120: note = VH P7-D6
DVQLQESGPSLVKPSQTLSLTCFVTGDSITSGDWNWIRKFPGNKLEYMGYLSYSGSTYYSPSLKSRISITRDTSKNQYYLQLNSVTTEDTATYYCASSYSSNYVWYFDVWGTGTSVTVSS

SEQ ID NO: 3455 - protein, 109 aa, synthetic construct; identical to SEQ ID NO: 3446
  REGION 1..109: note = VK P7-D6

SEQ ID NO: 3456 - protein, 8 aa, synthetic construct
  REGION 1..8: note = CDR_H1 P6-D11
GDSITSGD

SEQ ID NO: 3457 - protein, 7 aa, synthetic construct
  REGION 1..7: note = CDR_H2 P6-D11
LSYSGST

SEQ ID NO: 3458 - protein, 14 aa, synthetic construct
  REGION 1..14: note = CDR_H3 P6-D11
ASSYSSNYVWYFDV

SEQ ID NO: 3459 - protein, 9 aa, synthetic construct
  REGION 1..9: note = CDR_L1
TGAVTTSNY

SEQ ID NO: 3460 - skipped

SEQ ID NO: 3461 - protein, 9 aa, synthetic construct
  REGION 1..9: note = CDR_L3 P6-D11
ALWYSNLWV

SEQ ID NO: 3462 - DNA, 732 bp, synthetic construct
  misc_feature 1..732: note = DNA P6-D11
  source 1..732: mol_type = other DNA
gatgtgcagcttcaggagtcaggacctagcctcgtgaaaccctctcagactctgtccctcacctgttttgtcactggcgactccatcaccagtggtgactggaactggatccggaaattcccagggaataaacttgagtacatggggtacctaagctacagtggtagcacttactacagtccatctctcaaaagtcgaatctccatcactcgagacacatccaagaaccagtactacctgcagttgaattctgtgactactgaggacacagccacatattactgtgcaagctcctactctagtaactacgtttggtacttcgatgtctggggcacaggaacctcagtcaccgtctcctcagggtcgacaaagcttgaagaaggtgaattttcagaagcatccggacaggctgttgtgactcaggaatctgcactcaccacatcacctggtgaaacagtcacactcacttgtcgctcaagtactggggctgttacaactagtaactatgccaactgggtccaagaaaaaccagatcatttattcactggtctaataggtggtaccaacaaccgagctccaggtgttcctgccagattctcaggctccctgattggagacaaggctgccctcaccatcacaggggcacagactgaggatgaggcaatatatttctgtgctctatggtacagcaacctttgggtgttcggtggaggaaccaaactgactgtccta

SEQ ID NO: 3463 - protein, 120 aa, synthetic construct; identical to SEQ ID NO: 3454
  REGION 1..120: note = VH P6-D11

SEQ ID NO: 3464 - protein, 109 aa, synthetic construct
  REGION 1..109: note = VK P6-D11
QAVVTQESALTTSPGETVTLTCRSSTGAVTTSNYANWVQEKPDHLFTGLIGGTNNRAPGVPARFSGSLIGDKAALTITGAQTEDEAIYFCALWYSNLWVFGGGTKLTVL

SEQ ID NO: 3465 - protein, 8 aa, synthetic construct
  REGION 1..8: note = CDR_H1 P5-A9
GDSITSGY

SEQ ID NO: 3466 - protein, 7 aa, synthetic construct
  REGION 1..7: note = CDR_H2 P5-A9
LSNSGRT

SEQ ID NO: 3467 - protein, 14 aa, synthetic construct
  REGION 1..14: note = CDR_H3 P5-A9
ASSYYSNYVWYFDV

SEQ ID NO: 3468 - protein, 9 aa, synthetic construct
  REGION 1..9: note = CDR_L1 P5-A9
TGAVTTSNY

SEQ ID NO: 3469 - skipped

SEQ ID NO: 3470 - protein, 9 aa, synthetic construct
  REGION 1..9: note = CDR_L3 P5-A9
ALWYSNHWV

SEQ ID NO: 3471 - DNA, 732 bp, synthetic construct
  misc_feature 1..732: note = DNA P5-A9
  source 1..732: mol_type = other DNA
gatgtgcagcttcaggagtcaggacctggcctggcaaaaccttctcagactctgtccctcacctgttctgtcactggcgactccatcaccagtggttactggaactggatccggaaattcccagggaataaacttgagtatatggggtacctaagcaacagtggtagaacttactacaatccatctctcaaaagtcgaatctccatcactcgagacacatccaagaaccagtactacctgcagttgaattctgtgactactgaggacacagccacatattactgtgcaagctcctactatagtaactacgtttggtacttcgatgtctggggcacaggcaccactctcacagtctcctcagggtcgacaaagcttgaagaaggtgaattttcagaagcatccggacaggctgttgtgactcaggaatctgcactcaccacatcacctggtgaaacagtcacactcacttgtcgctcaagtactggggctgttacaactagtaactatgccaactgggtccaagaaaaaccagatcatttattcactggtctaataggtggtaccaacaaccgagctccaggtgttcctgccagattctcaggctccctgattggagacaaggctgccctcaccatcacaggggcacagactgaggatgaggcaatatatttctgtgctctatggtacagcaaccattgggtgttcggtggaggaaccaaactgactgtccta

SEQ ID NO: 3472 - protein, 120 aa, synthetic construct
  REGION 1..120: note = VH P5-A9
DVQLQESGPGLAKPSQTLSLTCSVTGDSITSGYWNWIRKFPGNKLEYMGYLSNSGRTYYNPSLKSRISITRDTSKNQYYLQLNSVTTEDTATYYCASSYYSNYVWYFDVWGTGTTLTVSS

SEQ ID NO: 3473 - protein, 109 aa, synthetic construct; identical to SEQ ID NO: 3446
  REGION 1..109: note = VK P5-A9

SEQ ID NO: 3474 - protein, 8 aa, synthetic construct
  REGION 1..8: note = CDR_H1 P4-C5
GDSITSGY

SEQ ID NO: 3475 - protein, 7 aa, synthetic construct
  REGION 1..7: note = CDR_H2 P4-C5
LSYSGST

SEQ ID NO: 3476 - protein, 14 aa, synthetic construct
  REGION 1..14: note = CDR_H3 P4-C5
ASSYYSNYVWYFDV

SEQ ID NO: 3477 - protein, 9 aa, synthetic construct
  REGION 1..9: note = CDR_L1 P4-C5
TGAVTTSNY

SEQ ID NO: 3478 - skipped

SEQ ID NO: 3479 - protein, 9 aa, synthetic construct
  REGION 1..9: note = CDR_L3 P4-C5
ALWYSNHWV

SEQ ID NO: 3480 - DNA, 732 bp, synthetic construct
  misc_feature 1..732: note = DNA P4-C5
  source 1..732: mol_type = other DNA
gatgtgcagcttcaggagtcaggacctagcctcgtgaaaccttctcagactctgtccctcacctgttctgtcactggcgactccatcaccagtggttactggaactggatccggaaattcccagggaataaacttgagtacatggcgtacctaagctacagtggtagcacttactacaatccatctctcaaaagtcgaatctccatcactcgagacacatccaagaaccagtactacctgcagttgaattctgtgactactgaggacacagccacatattactgtgcaagctcctactatagtaactacgtttggtacttcgatgtctggggcacagggacctcagtcaccgtctcctcagggtcgacaaagcttgaagaaggtgaattttcagaagcatccggacaggctgttgtgactcaggaatctgcactcaccacatcacctggtgaaacagtcacactcacttgtcgctcaagtactggggctgttacaactagtaactatgccaactgggtccaagaaaaaccagatcatttattcactggtctaataggtggtaccaacaaccgagctccaggtgttcctgccagattctcaggctccctgattggagacaaggctgccctcaccatcacaggggcacagactgaggatgaggcaatatatttctgtgctctatggtacagcaaccattgggtgttcggtggaggaaccaaactgactgtccta

SEQ ID NO: 3481 - protein, 120 aa, synthetic construct
  REGION 1..120: note = VH P4-C5
DVQLQESGPSLVKPSQTLSLTCSVTGDSITSGYWNWIRKFPGNKLEYMAYLSYSGSTYYNPSLKSRISITRDTSKNQYYLQLNSVTTEDTATYYCASSYYSNYVWYFDVWGTGTSVTVSS

SEQ ID NO: 3482 - protein, 109 aa, synthetic construct; identical to SEQ ID NO: 3446
  REGION 1..109: note = VK P4-C5

SEQ ID NO: 3483 - protein, 8 aa, synthetic construct
  REGION 1..8: note = CDR_H1 P3-H2
GDSITSGY

SEQ ID NO: 3484 - protein, 7 aa, synthetic construct
  REGION 1..7: note = CDR_H2 P3-H2
LSYSGST

SEQ ID NO: 3485 - protein, 14 aa, synthetic construct
  REGION 1..14: note = CDR_H3 P3-H2
ASSYYSNYVWYFDV

SEQ ID NO: 3486 - protein, 9 aa, synthetic construct
  REGION 1..9: note = CDR_L1 P3-H2
TGAVTTSNY

SEQ ID NO: 3487 - skipped

SEQ ID NO: 3488 - protein, 9 aa, synthetic construct
  REGION 1..9: note = CDR_L3 P3-H2
ALWYSNSWV

SEQ ID NO: 3489 - DNA, 732 bp, synthetic construct
  misc_feature 1..732: note = DNA P3-H2
  source 1..732: mol_type = other DNA
gatgtgcagcttcaggagtcaggacctagcctcgtgaaaccttctcagactctgtccctcacctgttctgtcactggcgactccatcaccagtggttactggaactggatccggaaattcccagggaataaacttgagtacatggcgtacctaagctacagtggtagcacttactacaatccatctctcaaaagtcgaatctccatcactcgagacacatccaagaaccagtactacctgcagttgaattctgtgactactgaggacacagccacatattactgtgcaagctcctactatagtaactacgtttggtacttcgatgtctggggcacagggaccacggtcaccgtctcctcagggtcgacaaagcttgaagaaggtgaattttcagaagcatccggacaggctgttgtgactcaggaatctgcactcaccacatcacctggtgaaacagtcacactcacttgtcgctcaagtactggggctgttacaactagtaactatgccaactgggtacaagaaaaaccagatcatttattcactggtctaataggtggtaccaacaaccgagctccaggtgttcctgccagattctcaggctccctgattggagacaaggctgccctcaccatcacaggggcacagactgaggatgaggcaatatatttctgtgctctatggtacagcaactcctgggtgttcggtggaggaaccaaactgactgtccta

SEQ ID NO: 3490 - protein, 120 aa, synthetic construct
  REGION 1..120: note = VH P3-H2
DVQLQESGPSLVKPSQTLSLTCSVTGDSITSGYWNWIRKFPGNKLEYMAYLSYSGSTYYNPSLKSRISITRDTSKNQYYLQLNSVTTEDTATYYCASSYYSNYVWYFDVWGTGTTVTVSS

SEQ ID NO: 3491 - protein, 109 aa, synthetic construct
  REGION 1..109: note = VK P3-H2
QAVVTQESALTTSPGETVTLTCRSSTGAVTTSNYANWVQEKPDHLFTGLIGGTNNRAPGVPARFSGSLIGDKAALTITGAQTEDEAIYFCALWYSNSWVFGGGTKLTVL

SEQ ID NO: 3492 - protein, 9 aa, synthetic construct
  REGION 1..9: note = CDR_H1 P1-H3
GSSITSGYS

SEQ ID NO: 3493 - protein, 7 aa, synthetic construct
  REGION 1..7: note = CDR_H2 P1-H3
INYSGST

SEQ ID NO: 3494 - protein, 10 aa, synthetic construct
  REGION 1..10: note = CDR_H3 P1-H3
ASYYYGNRAY

SEQ ID NO: 3495 - protein, 6 aa, synthetic construct
  REGION 1..6: note = CDR_L1 P1-H3
QNVGTN

SEQ ID NO: 3496 - skipped

SEQ ID NO: 3497 - protein, 9 aa, synthetic construct
  REGION 1..9: note = CDR_L3 P1-H3
QQYNSYPFT

SEQ ID NO: 3498 - DNA, 717 bp, synthetic construct
  misc_feature 1..717: note = DNA P1-H3
  source 1..717: mol_type = other DNA
gatgtgcagcttcaggagtcaggacctgacctggtgaaaccttctcagtcactttcactcacctgcactgtcactggctcttccatcaccagtggttatagctggcactggatccggcagtttccaggaaacaaactggaatggatgggctacataaactacagtggtagcactaactacaacccatctctcaaaagtcgaatttctatcactcgagacacatccaagaaccagttcttcctgcagttgaattctgtgactactgaggacacagccacatattattgtgcaagttattactacggtaatagggcttactggggccaagggactctggtcactgtctctgcagggtcgacaaagcttgaagaaggtgaattttcagaagcatccggagacattgtgatgacacagtctcacaaattcatgtccacatcagtcggagacagggtcagcgtcacctgcaaggccagtcagaatgtgggtactaatgtagcctggtatcaacagaaaccagggcaatctcctaaagtactgatttattcggcatcctaccggtacagtggagtccctgatcgcttcacaggcagtggatctgggacagatttcactctcaccatcagcaatgtgcagtctgaagacttggcagagtatttctgtcagcaatataacagctatccattcacgttcggctcggggaccaagctggaaatgaaa

SEQ ID NO: 3499 - protein, 116 aa, synthetic construct
  REGION 1..116: note = VH P1-H3
DVQLQESGPDLVKPSQSLSLTCTVTGSSITSGYSWHWIRQFPGNKLEWMGYINYSGSTNYNPSLKSRISITRDTSKNQFFLQLNSVTTEDTATYYCASYYYGNRAYWGQGTLVTVS

SEQ ID NO: 3500 - protein, 107 aa, synthetic construct
  REGION 1..107: note = VK P1-H3
DIVMTQSHKFMSTSVGDRVSVTCKASQNVGTNVAWYQQKPGQSPKVLIYSASYRYSGVPDRFTGSGSGTDFTLTISNVQSEDLAEYFCQQYNSYPFTFGSGTKLEMK

SEQ ID NO: 3501 - protein, 9 aa, synthetic construct
  REGION 1..9: note = CDR_H1 P1-B12
GSSITSGYS

SEQ ID NO: 3502 - protein, 7 aa, synthetic construct
  REGION 1..7: note = CDR_H2 P1-B12
INYSGST

SEQ ID NO: 3503 - protein, 10 aa, synthetic construct
  REGION 1..10: note = CDR_H3 P1-B12
ASYYYGNRAY

SEQ ID NO: 3504 - protein, 6 aa, synthetic construct
  REGION 1..6: note = CDR_L1 P1-B12
QNVGTN

SEQ ID NO: 3505 - skipped

SEQ ID NO: 3506 - protein, 9 aa, synthetic construct
  REGION 1..9: note = CDR_L3 P1-B12
QQYNSYPLT

SEQ ID NO: 3507 - DNA, 717 bp, synthetic construct
  misc_feature 1..717: note = DNA P1-B12
  source 1..717: mol_type = other DNA
gatgtgcagcttcaggagtcaggacctgacctggtgaaaccttctcagtcactttcactcacctgcactgtcactggctcttccatcaccagtggttatagctggcactggatccggcagtttccaggaaacaaactggaatggatgggctacataaactacagtggtagcactaactacaacccatctctcaaaagtcgaatttctatcactcgagacacatccaagaaccagttcttcctgcagttgaattctgtgactactgaggacacagccacatattattgtgcaagttattactacggtaatagggcttactggggccaagggactctggtcactgtctctgcagggtcgacaaagcttgaagaaggtgaattttcagaagcatccggagacattgtgatgtcacagtctcacaaattcatgtccacatcagtaggagacagggtcagcatcacctgcaaggccagtcagaatgtgggtactaatgtagcctggtatcaacagaaaccagggcaatctcctaaatcactgatttactcggcatcctaccggtacagtggagtccctgatcgcttcacaggcagtggatctgggacagatttcactctcaccatcagcaatgtgcagtctgaagacttggcagagtatttctgtcagcaatataacagctatcctctcacgttcggtgctgggaccaagctggaaatgaaa

SEQ ID NO: 3508 - protein, 117 aa, synthetic construct
  REGION 1..117: note = VH P1-B12
DVQLQESGPDLVKPSQSLSLTCTVTGSSITSGYSWHWIRQFPGNKLEWMGYINYSGSTNYNPSLKSRISITRDTSKNQFFLQLNSVTTEDTATYYCASYYYGNRAYWGQGTLVTVSA

SEQ ID NO: 3509 - protein, 107 aa, synthetic construct
  REGION 1..107: note = VK P1-B12
DIVMSQSHKFMSTSVGDRVSITCKASQNVGTNVAWYQQKPGQSPKSLIYSASYRYSGVPDRFTGSGSGTDFTLTISNVQSEDLAEYFCQQYNSYPLTFGAGTKLEMK

SEQ ID NO: 3510 - protein, 9 aa, synthetic construct
  REGION 1..9: note = CDR_H1 P4-G12
GSSITSGYS

SEQ ID NO: 3511 - protein, 9 aa, synthetic construct
  REGION 1..9: note = CDR_H2 P4-G12
GSSITSGYS

SEQ ID NO: 3512 - protein, 10 aa, synthetic construct
  REGION 1..10: note = CDR_H3 P4-G12
ASYYYGNRAY

SEQ ID NO: 3513 - protein, 6 aa, synthetic construct
  REGION 1..6: note = CDR_L1 P4-G12
QNVGTN

SEQ ID NO: 3514 - skipped

SEQ ID NO: 3515 - protein, 9 aa, synthetic construct
  REGION 1..9: note = CDR_L3 P4-G12
QQYNSYPYT

SEQ ID NO: 3516 - DNA, 717 bp, synthetic construct
  misc_feature 1..717: note = DNA P4-G12
  source 1..717: mol_type = other DNA
gatgtgcagcttcaggagtcaggacctgacctggtgaaaccttctcagtcactttcactcacctgcactgtcactggctcttccatcaccagtggttatagctggcactggatccggcagtttccaggaaacaaactggaatggatgggctacataaactacagtggtagcactaactacaacccatctctcaaaagtcgaatttctatcactcgagacacatccaagaaccagttcttcctgcagttgaattctgtgactactgaggacacagccacatattattgtgcaagttattactacggtaatagggcttactggggccaagggactctggtcactgtctctgcagggtcgacaaagcttgaagaaggtgaattttcagaagcatccggagacattgtgatgtcacagtctcaaaaattcatgtccacatcagtaggagacagggtcagcgtcacctgcaaggccagtcagaatgtgggtactaatgtagcctggtatcaacagaaaccagggcaatctcctaaagtactgatttactcggcatcctaccggtacagtggagtccctgatcgcttcacaggcagtggatctgggacagatttcactctcaccatcagcaatgtgcagtctgaagacttggcagagtatttctgtcagcaatataacagctatccgtacacgttcggaggggggaccaagctggaaatgaaa

SEQ ID NO: 3517 - protein, 116 aa, synthetic construct; identical to SEQ ID NO: 3499
  REGION 1..116: note = VH P4-G12

SEQ ID NO: 3518 - protein, 107 aa, synthetic construct
  REGION 1..107: note = VK P4-G12
DIVMSQSQKFMSTSVGDRVSVTCKASQNVGTNVAWYQQKPGQSPKVLIYSASYRYSGVPDRFTGSGSGTDFTLTISNVQSEDLAEYFCQQYNSYPYTFGGGTKLEMK

SEQ ID NO: 3519 - protein, 9 aa, synthetic construct
  REGION 1..9: note = CDR_H1 P2-A10
GYSITSGYY

SEQ ID NO: 3520 - protein, 7 aa, synthetic construct
  REGION 1..7: note = CDR_H2
ISYDGSN

SEQ ID NO: 3521 - protein, 9 aa, synthetic construct
  REGION 1..9: note = CDR_3 P2-A10
ATATGTGDY

SEQ ID NO: 3522 - protein, 11 aa, synthetic construct
  REGION 1..11: note = CDR_L1 P2-A10
QSLVHSNGDTY

SEQ ID NO: 3523 - skipped

SEQ ID NO: 3524 - protein, 9 aa, synthetic construct
  REGION 1..9: note = CDR_L3 P2-A10
SQSTHFPPT

SEQ ID NO: 3525 - DNA, 729 bp, synthetic construct
  misc_feature 1..729: note = DNA P2-A10
  source 1..729: mol_type = other DNA
gatgtgcagcttcaggagtcaggacctggcctcgtgaaaccttctcagtctctgtctctcacctgctctgtcactggctactccatcaccagtggttattactggaactggatccggcagtttccaggaaacaaactggaatggatgggctacataagctacgatggtagcaataactacaacccatctctcaaaaatcgaatctccatcactcgtgacacatctaagaaccagtttttcctgaagttgaattctgtgactactgaggacacagccacatattactgtgcaacagcgactgggacgggggactactggggccaaggcaccactctcacagtctcctcagggtcgacaaagcttgaagaaggtgaattttcagaagcatccggagatgttgtgatgacccaaactccactctccctgcctgtcagtcttggagatcaagcctccatctcttgcagatctagtcagagccttgtacacagtaatggagacacctatttacattggtacctgcagaagccaggccagtctccaaagctcctgatctacaaagtttccaaccgattttctggggtcccagacaggttcagtggcagtggatcagggacagatttcacactcaagatcagcagagtggaggctgaggatctgggagtttatttctgctctcaaagtacacattttcctccgacgttcggtggaggcaccaagctggaaatcaat

SEQ ID NO: 3526 - protein, 116 aa, synthetic construct
  REGION 1..116: note = VH P2-A10
DVQLQESGPGLVKPSQSLSLTCSVTGYSITSGYYWNWIRQFPGNKLEWMGYISYDGSNNYNPSLKNRISITRDTSKNQFFLKLNSVTTEDTATYYCATATGTGDYWGQGTTLTVSS

SEQ ID NO: 3527 - protein, 112 aa, synthetic construct
  REGION 1..112: note = VK P2-A10
DVVMTQTPLSLPVSLGDQASISCRSSQSLVHSNGDTYLHWYLQKPGQSPKLLIYKVSNRFSGVPDRFSGSGSGTDFTLKISRVEAEDLGVYFCSQSTHFPPTFGGGTKLEIN

SEQ ID NO: 3528 - protein, 9 aa, synthetic construct
  REGION 1..9: note = CDR_H1 P4-D11
GYSITSGYY

SEQ ID NO: 3529 - protein, 7 aa, synthetic construct
  REGION 1..7: note = CDR_H2 P4-D11
ISYDGSN

SEQ ID NO: 3530 - protein, 9 aa, synthetic construct
  REGION 1..9: note = CDR_H3 P4-D11
ATATGTGDY

SEQ ID NO: 3531 - protein, 11 aa, synthetic construct
  REGION 1..11: note = CDR_L1 P4-D11
QSLVHSNGNTY

SEQ ID NO: 3532 - skipped

SEQ ID NO: 3533 - protein, 9 aa, synthetic construct
  REGION 1..9: note = CDR_L3 P4-D11
SQSTHFPPT

SEQ ID NO: 3534 - DNA, 729 bp, synthetic construct
  misc_feature 1..729: note = DNA P4-D11
  source 1..729: mol_type = other DNA
gatgtgcagcttcaggagtcaggacctggcctcgtgaaaccttctcagtctctgtctctcacctgctctgtcactggctactccatcaccagtggttattactggaactggatccggcagtttccaggaaacaaactggaatggatgggctacataagctacgatggtagcaataactacaacccatctctcaaaaatcgaatctccatcactcgtgacacatctaagaaccagtttttcctgaagttgaattctgtgactactgaggacacagccacatattactgtgcaacagcgactgggacgggggactactggggccaaggcaccactctcacagtctcctcagggtcgacaaagcttgaagaaggtgaattttcagaagcatccggagatgttgtgatgacccaaactccactctccctgcctgtcagtcttggagatcaagcctccatctcttgcagatctagtcagagccttgtacacagtaatggaaacacctatttacattggtacctgcagaagccaggccagtctccaaagctcctgatctacaaagtttccaaccgattttctggggtcccagacaggttcagtggcagtggatcagggacagatttcacactcaagatcagcagagtggaggctgaggatctgggagtttatttctgctctcaaagtacacattttcctccgacgttcggtggaggcaccaagctggaaatcaat

SEQ ID NO: 3535 - protein, 116 aa, synthetic construct; identical to SEQ ID NO: 3526
  REGION 1..116: note = VH P4-D11

SEQ ID NO: 3536 - protein, 112 aa, synthetic construct
  REGION 1..112: note = VK P4-D11
DVVMTQTPLSLPVSLGDQASISCRSSQSLVHSNGNTYLHWYLQKPGQSPKLLIYKVSNRFSGVPDRFSGSGSGTDFTLKISRVEAEDLGVYFCSQSTHFPPTFGGGTKLEIN

SEQ ID NO: 3537 - protein, 9 aa, synthetic construct
  REGION 1..9: note = CDR_H1 P7-D12
GYSITSGYY

SEQ ID NO: 3538 - protein, 7 aa, synthetic construct
  REGION 1..7: note = CDR_H2 P7-D12
ISYDGSN

SEQ ID NO: 3539 - protein, 9 aa, synthetic construct
  REGION 1..9: note = CDR_H3 P7-D12
ATATGTGDY

SEQ ID NO: 3540 - protein, 11 aa, synthetic construct
  REGION 1..11: note = CDR_L1 P7-D12
QSLVHSNGNTY

SEQ ID NO: 3541 - skipped

SEQ ID NO: 3542 - protein, 9 aa, synthetic construct
  REGION 1..9: note = CDR_L3 P7-D12
SQSTHFPPT

SEQ ID NO: 3543 - DNA, 729 bp, synthetic construct
  misc_feature 1..729: note = DNA P7-D12
  source 1..729: mol_type = other DNA
gatgtgcagcttcaggagtcgggacctggcctggtgaaaccttctcagtctctgtctctcacctgctctgtcactggctactccatcaccagtggttattactggaactggatccggcagtttccgggaaacaaactggagtggatggcctacataagctacgatggtagcaataactacaacccatctctcaaaaatcgaatctccatcactcgtgacacttctaagaaccagtttttcctgaagttgaattctgtgactactgaggacacagccacatattactgtgcaacagcgactgggacgggggactactggggccaaggcaccagtctcacagtctcctcagggtcgacaaagcttgaagaaggtgaattttcagaagcatccggagatgttgtgatgacccaaactccactctccctgcctgtcagtcttggagatcaagcctccatctcttgcagatctagtcagagccttgtacacagtaatggaaacacctatttacattggtacctgcagaagccaggccagtctccaaagctcctgatctacaaagtttccaaccgattttctggggtcccagacaggttcagtggcagtggatcagggacagatttcacactcaagatcagcagagtggaggctgaggatctgggagtttatttctgctctcaaagtacacattttcccccgacgttcggtggaggcaccaagctggaaatcaat

SEQ ID NO: 3544 - protein, 116 aa, synthetic construct
  REGION 1..116: note = VH P7-D12
DVQLQESGPGLVKPSQSLSLTCSVTGYSITSGYYWNWIRQFPGNKLEWMAYISYDGSNNYNPSLKNRISITRDTSKNQFFLKLNSVTTEDTATYYCATATGTGDYWGQGTSLTVSS

SEQ ID NO: 3545 - protein, 112 aa, synthetic construct; identical to SEQ ID NO: 3536
  REGION 1..112: note = VK P7-D12

SEQ ID NO: 3546 - protein, 9 aa, synthetic construct
  REGION 1..9: note = CDR_H1 P1-C11
GYSITSGYY

SEQ ID NO: 3547 - protein, 7 aa, synthetic construct
  REGION 1..7: note = CDR_H2 P1-C11
ISYDGSN

SEQ ID NO: 3548 - protein, 9 aa, synthetic construct
  REGION 1..9: note = CDR_H3 P1-C11
ATATGTGDY

SEQ ID NO: 3549 - protein, 11 aa, synthetic construct
  REGION 1..11: note = CDR_L1 P1-C11
QSLVHSNGNTY

SEQ ID NO: 3550 - skipped

SEQ ID NO: 3551 - protein, 9 aa, synthetic construct
  REGION 1..9: note = CDR_L3 P1-C11
SQSTHVPPT

SEQ ID NO: 3552 - DNA, 729 bp, synthetic construct
  misc_feature 1..729: note = DNA P1-C11
  source 1..729: mol_type = other DNA
gatgtgcagcttcaggagtcaggacctggcctcgtgaaaccttctcagtctctgtctctcacctgctctgtcactggctactccatcaccagtggttattactggaactggatccgacagtttccaggaaacaaactggaatggatggcctacataagctacgatggtagcaataactacaacccatctctcaaaaatcgaatctccatcactcgtgacacatctaagaaccagtttttcctgaagttgaattctgtgactactgaggacacagccacatattactgtgcaacagcgactgggacgggggactactggggccaaggcaccactctcacagtctcctcagggtcgacaaagcttgaagaaggtgaattttcagaagcatccggagatgttgtgatgacccaaactccactctccctgcctgtcagtcttggagatcaagcctccatctcttgcagatctagtcagagccttgtacacagtaatggaaacacctatttacattggtacctgcagaagccaggccagtctccaaagctcctgatctacaaagtttccaaccgattttctggggtcccagacaggttcagtggcagtggatcagggacagatttcacactcaagatcagcagagtggaggctgacgatctgggagtttatttctgctctcaaagtacacatgttcctccgacgttcggtggaggcaccaagctggaaatcaat

SEQ ID NO: 3553 - protein, 116 aa, synthetic construct
  REGION 1..116: note = VH P1-C11
DVQLQESGPGLVKPSQSLSLTCSVTGYSITSGYYWNWIRQFPGNKLEWMAYISYDGSNNYNPSLKNRISITRDTSKNQFFLKLNSVTTEDTATYYCATATGTGDYWGQGTTLTVSS

SEQ ID NO: 3554 - protein, 112 aa, synthetic construct
  REGION 1..112: note = VK P1-C11
DVVMTQTPLSLPVSLGDQASISCRSSQSLVHSNGNTYLHWYLQKPGQSPKLLIYKVSNRFSGVPDRFSGSGSGTDFTLKISRVEADDLGVYFCSQSTHVPPTFGGGTKLEIN

SEQ ID NO: 3555 - protein, 9 aa, synthetic construct
  REGION 1..9: note = CDR_H1 P4-F9
GYSITSGYY

SEQ ID NO: 3556 - protein, 7 aa, synthetic construct
  REGION 1..7: note = CDR_H2 P4-F9
ISYDGSN

SEQ ID NO: 3557 - protein, 9 aa, synthetic construct
  REGION 1..9: note = CDR_H3 P4-F9
ATATGTGDY

SEQ ID NO: 3558 - protein, 11 aa, synthetic construct
  REGION 1..11: note = CDR_L1 P4-F9
QSLVHSNGNTY

SEQ ID NO: 3559 - skipped

SEQ ID NO: 3560 - protein, 9 aa, synthetic construct
  REGION 1..9: note = CDR_L3 P4-F9
SQSTHVPYT

SEQ ID NO: 3561 - DNA, 729 bp, synthetic construct
  misc_feature 1..729: note = DNA P4-F9
  source 1..729: mol_type = other DNA
gatgtgcagcttcaggagtcaggacctggcctcgtgaaaccttctcagtctctgtctctcacctgctctgtcactggctactccatcaccagtggttattactggaactggatccggcagtttccaggaaacaaactggaatggatgggctacataagctacgatggtagcaataactacaacccatctctcaaaaagcgaatctccatcactcgtgacacatctaagaaccagtttttcctgaagttgaattctgtgactactgaggacacagccacatattactgtgcaacagcgactgggacgggggactactggggccaaggcaccagtctcacagtctcctcagggtcgacaaagcttgaagaaggtgaattttcagaagcatccggagatgttgtgatgacccaaactccactctccctgcctgtcagtcttggagatcaagcctccatctcttgcagatctagtcagagccttgtacacagtaatggaaacacctatttacattggtacctgcagaagccaggccagtctccaaagctcctgatctacaaagtttccaaccgattttctggggtcccagacaggttcagtggcagtggatcagggacagatttcacactcaagatcagcagagtggaggctgaggatctgggagtttatttctgctctcaaagtacacatgttccgtacacgttcggaggggggaccaagctggaaatgaaa

SEQ ID NO: 3562 - protein, 116 aa, synthetic construct
  REGION 1..116: note = VH P4-F9
DVQLQESGPGLVKPSQSLSLTCSVTGYSITSGYYWNWIRQFPGNKLEWMGYISYDGSNNYNPSLKKRISITRDTSKNQFFLKLNSVTTEDTATYYCATATGTGDYWGQGTSLTVSS

SEQ ID NO: 3563 - protein, 112 aa, synthetic construct
  REGION 1..112: note = VK P4-F9
DVVMTQTPLSLPVSLGDQASISCRSSQSLVHSNGNTYLHWYLQKPGQSPKLLIYKVSNRFSGVPDRFSGSGSGTDFTLKISRVEAEDLGVYFCSQSTHVPYTFGGGTKLEMK

SEQ ID NO: 3564 - protein, 9 aa, synthetic construct
  REGION 1..9: note = CDR_H1 P6-H5
GYSITSGYY

SEQ ID NO: 3565 - protein, 7 aa, synthetic construct
  REGION 1..7: note = CDR_H2 P6-H5
ISYGGSY

SEQ ID NO: 3566 - protein, 9 aa, synthetic construct
  REGION 1..9: note = CDDR_H3 P6-H5
ATATGTGDY

SEQ ID NO: 3567 - protein, 11 aa, synthetic construct
  REGION 1..11: note = CDR_L1 P6-H5
QSLVHSTGNTY

SEQ ID NO: 3568 - skipped

SEQ ID NO: 3569 - protein, 9 aa, synthetic construct
  REGION 1..9: note = CDR_L3 P6-H5
SQSTHVPPT

SEQ ID NO: 3570 - DNA, 729 bp, synthetic construct
  misc_feature 1..729: note = DNA P6-H5
  source 1..729: mol_type = other DNA
gatgtgcagcttcaggagtcaggacctggcctcgtgaaaccttctcagtctctgtctctcacctgctctgtcactggctactccatcaccagtggttattactggaactggatccggcagtttccaggaaacaaactggaatggatgggctacataagctacggtggtagctataactacaacccatctctcaaaaatcgaatctccatcactcgtgacacatctaagaaccagtttttcctgaagttgaattctgtgactactgaggacacagccacatattactgtgcaacagcgactgggacgggggactactggggccaaggcaccagtctcacagtctcctcagggtcgacaaagcttgaagaaggtgaattttcagaagcatccggagatgttgtgatgacccaaactccactctccctgcctgtcagtcttggagatcaagcctccatctcttgcagctctagtcagagccttgtacacagtactggaaacacctatttacattggtacctgcagaaaccaggccagtctccaaagctcctgatctacaaagtttccaaccgattttctggggtcccagacaggttcagtggcagtggatcagggacagatttcacactcaagatcagcagagtggaggctgaggatctgggagtttatttctgctctcaaagtacacatgttcctccgacgttcggtggaggcaccaagctggaaatcaat

SEQ ID NO: 3571 - protein, 116 aa, synthetic construct
  REGION 1..116: note = VH P6-H5
DVQLQESGPGLVKPSQSLSLTCSVTGYSITSGYYWNWIRQFPGNKLEWMGYISYGGSYNYNPSLKNRISITRDTSKNQFFLKLNSVTTEDTATYYCATATGTGDYWGQGTSLTVSS

SEQ ID NO: 3572 - protein, 112 aa, synthetic construct
  REGION 1..112: note = VK P6-H5
DVVMTQTPLSLPVSLGDQASISCSSSQSLVHSTGNTYLHWYLQKPGQSPKLLIYKVSNRFSGVPDRFSGSGSGTDFTLKISRVEAEDLGVYFCSQSTHVPPTFGGGTKLEIN

SEQ ID NO: 3573 - protein, 8 aa, synthetic construct
  REGION 1..8: note = CDR_H1 P2-D7
GYTFTNYW

SEQ ID NO: 3574 - protein, 8 aa, synthetic construct
  REGION 1..8: note = CDR_H2 P2-D7
IDPSDSET

SEQ ID NO: 3575 - protein, 11 aa, synthetic construct
  REGION 1..11: note = CDR_H3 P2-D7
ATGDYYGRRDY

SEQ ID NO: 3576 - protein, 7 aa, synthetic construct
  REGION 1..7: note = CDR_L1 P2-D7
SSVSSSY

SEQ ID NO: 3577 - skipped

SEQ ID NO: 3578 - protein, 9 aa, synthetic construct
  REGION 1..9: note = CDR_L3 P2-D7
QQYSGYPFT

SEQ ID NO: 3579 - DNA, 723 bp, synthetic construct
  misc_feature 1..723: note = DNA P2-D7
  source 1..723: mol_type = other DNA
gaggtccaactgcagcagcctggggctgagctggtgaggcctgggtcttcagtgaagctgtcctgcaaggcttctggctacaccttcaccaactactggatgcattgggtgaaacagaggcctatacaaggccttgaatggattggtaacattgacccttctgatagtgaaactcactacaatcaaaagttcaaggacaaggccacattgactgtagacaaatcctccagcacagcctacatgcagctcagcagcctgacatctgaggactctgcggtctattactgtgcaacaggggattactacggtaggagggactactggggccaaggcaccactctcacagtctcctcagggtcgacaaagcttgaagaaggtgaattttcagaagcatccggacaaattgtgctcacccagtctccagcaatcatgtctgcatctccaggggaaaaggtcaccatgacctgcagggccagctcaagtgtaagttccagttatttgtactggtaccagcagaagtcaggtgcctcccccaaactctggatttatagcacatccaacttggcttctggagtccctgctcgcttcagtggcagtgggtctgggacctcttactctctcacaatcagcagtgtggaggctgaagatgctgccacttattactgccagcagtacagtggttacccgttcacattcggaggggggaccaagctggagctgaaa

SEQ ID NO: 3580 - protein, 118 aa, synthetic construct
  REGION 1..118: note = VH P2-D7
EVQLQQPGAELVRPGSSVKLSCKASGYTFTNYWMHWVKQRPIQGLEWIGNIDPSDSETHYNQKFKDKATLTVDKSSSTAYMQLSSLTSEDSAVYYCATGDYYGRRDYWGQGTTLTVSS

SEQ ID NO: 3581 - protein, 108 aa, synthetic construct
  REGION 1..108: note = VK P2-D7
QIVLTQSPAIMSASPGEKVTMTCRASSSVSSSYLYWYQQKSGASPKLWIYSTSNLASGVPARFSGSGSGTSYSLTISSVEAEDAATYYCQQYSGYPFTFGGGTKLELK

SEQ ID NO: 3582 - protein, 8 aa, synthetic construct
  REGION 1..8: note = CDR_H1 P3-F5
GYTFTSYW

SEQ ID NO: 3583 - protein, 8 aa, synthetic construct
  REGION 1..8: note = CDR_H2 P3-F5
INPTNGNT

SEQ ID NO: 3584 - protein, 11 aa, synthetic construct
  REGION 1..11: note = CDR_H3 P3-F5
ATGDYYGRRDY

SEQ ID NO: 3585 - protein, 7 aa, synthetic construct
  REGION 1..7: note = CDR_L1 P3-F5
SSVSSSY

SEQ ID NO: 3586 - skipped

SEQ ID NO: 3587 - protein, 9 aa, synthetic construct
  REGION 1..9: note = CDR_L3 P3-F5
QQYSGYPYT

SEQ ID NO: 3588 - DNA, 723 bp, synthetic construct
  misc_feature 1..723: note = DNA P3-F5
  source 1..723: mol_type = other DNA
gaggtccaactgcagcagcctgggactgaactggtgaagcctggggcttcagtgaagctgtcctgcaaggcttctggctacaccttcaccagctactggatgcactgggtgaagcagaggcctggacaaggccttgagtggattggaaatattaatcctaccaatggtaatactaactacaatgagaagttcaagagcaaggccacactgactgtagacaaatcctccagcacagcctacatgcagctcagcagcctgacatctgaggactctgcggtctattactgtgcaacaggggattactacggtaggagggactactggggccaaggcaccagtctcacagtctcctcagggtcgacaaagcttgaagaaggtgaattttcagaagcatccggacaaattgttctcacccagtctccagcaatcatgtctgcatctccaggggaaaaggtcaccatgacctgcagggccagctcaagtgtaagttccagttacttgtactggtaccagcagaagtcaggtgcctcccccaaactctggatttatagcacatccaacttggcttctggagtccctgctcgcttcagtggcagtgggtctgggacctcttactctctcacaatcagcagtgtggaggctgaagatgctgccacttattactgccagcagtacagtggttacccgtacacgttcggaggggggaccaagctggaaatgaaa

SEQ ID NO: 3589 - protein, 118 aa, synthetic construct
  REGION 1..118: note = VH P3-F5
EVQLQQPGTELVKPGASVKLSCKASGYTFTSYWMHWVKQRPGQGLEWIGNINPTNGNTNYNEKFKSKATLTVDKSSSTAYMQLSSLTSEDSAVYYCATGDYYGRRDYWGQGTSLTVSS

SEQ ID NO: 3590 - protein, 108 aa, synthetic construct
  REGION 1..108: note = VK P3-F5
QIVLTQSPAIMSASPGEKVTMTCRASSSVSSSYLYWYQQKSGASPKLWIYSTSNLASGVPARFSGSGSGTSYSLTISSVEAEDAATYYCQQYSGYPYTFGGGTKLEMK

SEQ ID NO: 3591 - protein, 8 aa, synthetic construct
  REGION 1..8: note = CDR_H1 P3-C5
GYTFTSYW

SEQ ID NO: 3592 - protein, 8 aa, synthetic construct
  REGION 1..8: note = CDR_H2 P3-C5
IHPNSDRP

SEQ ID NO: 3593 - protein, 9 aa, synthetic construct
  REGION 1..9: note = CDR_H3 P3-C5
ATGHSDGDY

SEQ ID NO: 3594 - protein, 5 aa, synthetic construct
  REGION 1..5: note = CDR_L1 P3-C5
SSVSY

SEQ ID NO: 3595 - skipped

SEQ ID NO: 3596 - protein, 11 aa, synthetic construct
  REGION 1..11: note = CDR_L3 P3-C5
QQWSSYPPMYT

SEQ ID NO: 3597 - DNA, 717 bp, synthetic construct
  misc_feature 1..717: note = DNA P3-C5
  source 1..717: mol_type = other DNA
gaggtccaactgcagcagcctggggctgagctggtaaagcctggggcttcagtgaagttgtcctgcaaggcttctggctacactttcaccagctactggatgcactgggtgaagcagaggcctggacaaggccttgagtggattggaatgattcatcctaatagtgatcgtcctaactacaatgagaagttcaagagtaaggccactctgactgtagacaaatcctccagcacagcctacatgcaactcagcagcctgacatctgaggactctgcggtctattactgcgcgacggggcactccgacggtgactactggggccaaggcaccagtctcacagtctcctcagggtcgacaaagcttgaagaaggtgaattttcagaagcatccggagaaaatgtgctcacccagtctccagcaatcatgtctgcatctccaggagagaaggtcaccatgacctgcagtgccagctcaagtgtaagttacatgtgctggtaccagcagaagccaggatcctcccccagactcctgatttatgacacatccaacctggcttctggtgtccctgttcgcttcagtggcagtgggtctgggacctcttactctctcacaatcaaccgaatggaggctgaagatgctgccacttattactgccagcagtggagtagttacccacccatgtacacgttcggaggggggaccaagctggagctgaaa

SEQ ID NO: 3598 - protein, 116 aa, synthetic construct
  REGION 1..116: note = VH P3-C5
EVQLQQPGAELVKPGASVKLSCKASGYTFTSYWMHWVKQRPGQGLEWIGMIHPNSDRPNYNEKFKSKATLTVDKSSSTAYMQLSSLTSEDSAVYYCATGHSDGDYWGQGTSLTVSS

SEQ ID NO: 3599 - protein, 108 aa, synthetic construct
  REGION 1..108: note = VK P3-C5
ENVLTQSPAIMSASPGEKVTMTCSASSSVSYMCWYQQKPGSSPRLLIYDTSNLASGVPVRFSGSGSGTSYSLTINRMEAEDAATYYCQQWSSYPPMYTFGGGTKLELK

SEQ ID NO: 3600 - protein, 8 aa, synthetic construct
  REGION 1..8: note = CDR_H1 P8-F4
GFTFSDAW

SEQ ID NO: 3601 - protein, 10 aa, synthetic construct
  REGION 1..10: note = CDR_H2 P8-F4
IRNKANNHAT

SEQ ID NO: 3602 - protein, 6 aa, synthetic construct
  REGION 1..6: note = CDR_H3 P8-F4
ATWDGY

SEQ ID NO: 3603 - protein, 7 aa, synthetic construct
  REGION 1..7: note = CDR_L1 P8-F4
SSISSNY

SEQ ID NO: 3604 - skipped

SEQ ID NO: 3605 - protein, 9 aa, synthetic construct
  REGION 1..9: note = CDR_L3 P8-F4
QQGRSIPYT

SEQ ID NO: 3606 - DNA, 714 bp, synthetic construct
  misc_feature 1..714: note = DNA P8-F4
  source 1..714: mol_type = other DNA
gaagtgaagcttgaggagtctggaggaggcttggtgcaacctggaggatccatgaaactctcttgtgctgcctctggattcacttttagtgacgcctggatggactgggtccgccagtctccagagaaggggcttgagtgggttgctgaaattagaaacaaagctaataatcatgcaacatactatgctgagtctgtgaaagggaggttcaccatctcaagagatgattccaaaagtagtgtctacctgcaaatgaacagcttaagagctgaagacactggcatttattactgtgccacctgggacggctactggggccaaggcaccagtctcacagtctcctcagggtcgacaaagcttgaagaaggtgaattttcagaagcatccggagaaaatgtgctcacccagtctccaaccaccatggctgcatctcccggggagaagatcactatcacctgcagtgccagctcaagtataagttccaattacttgcattggtatcagcagaagccaggattctcccctaaactcttgatttataggacatccaatctggcttctggagtcccagctcgcttcagtggcagtgggtctgggacctcttactctctcacaattggcaccatggaggctgaagatgttgccacttactactgccagcagggtcgtagtataccgtacacgttcggaggggggaccaagctggagctgaaa

SEQ ID NO: 3607 - protein, 115 aa, synthetic construct
  REGION 1..115: note = VH P8-F4
EVKLEESGGGLVQPGGSMKLSCAASGFTFSDAWMDWVRQSPEKGLEWVAEIRNKANNHATYYAESVKGRFTISRDDSKSSVYLQMNSLRAEDTGIYYCATWDGYWGQGTSLTVSS

SEQ ID NO: 3608 - protein, 108 aa, synthetic construct
  REGION 1..108: note = VK P8-F4
ENVLTQSPTTMAASPGEKITITCSASSSISSNYLHWYQQKPGFSPKLLIYRTSNLASGVPARFSGSGSGTSYSLTIGTMEAEDVATYYCQQGRSIPYTFGGGTKLELK

SEQ ID NO: 3609 - protein, 8 aa, synthetic construct
  REGION 1..8: note = CDR_H1 P8-C2
GYTFTSYW

SEQ ID NO: 3610 - protein, 8 aa, synthetic construct
  REGION 1..8: note = CDR_H2 P8-C2
INPSNGGT

SEQ ID NO: 3611 - protein, 11 aa, synthetic construct
  REGION 1..11: note = CDR_H3 P8-C2
AVPNWDDVMDY

SEQ ID NO: 3612 - protein, 7 aa, synthetic construct
  REGION 1..7: note = CDR_L1 P8-C2
SSVSSSY

SEQ ID NO: 3613 - skipped

SEQ ID NO: 3614 - protein, 9 aa, synthetic construct
  REGION 1..9: note = CDR_L3 P8-C2
QQYSGYSFT

SEQ ID NO: 3615 - DNA, 723 bp, synthetic construct
  misc_feature 1..723: note = DNA P8-C2
  source 1..723: mol_type = other DNA
gaggtccaactgcagcagcctgggactgaactggtgaagcctggggcttcagtgaagctgtcctgcaaggcttctggctacaccttcaccagctactggatgcactgggtgaagcagaggcctggacaaggccttgagtggattggaaatattaatccaagcaatggtgggactaactacaatgagaagttcaagagcaaggccacactgactgttgacagatcctccagcacagcctacatgcagctcagcagcctgacatctgaggactctgcggtctattattgtgcagttcctaactgggacgatgttatggactactggggtcaaggaacctcagtcaccgtctcctcagggtcgacaaagcttgaagaaggtgaattttcagaagcatccggacaaattgttctcacccagtctccaccaatcatgtctgcatctcctggggaacgggtcaccatgacctgcagtgccagctcaagtgtaagttccagctacttgttctggtaccagcagaagccaggatcctccccccaagtatggatttatagcacatccaacctggcttctggagtccctactcgcttcagcggcagtgggtctgggacctcttattctctcacaatcagcagcatggaggctgaagatgctgccacttattactgccagcagtacagtggttactcattcacgttcggtgctgggacaaagctggaaatgaaa

SEQ ID NO: 3616 - protein, 118 aa, synthetic construct
  REGION 1..118: note = VH P8-C2
EVQLQQPGTELVKPGASVKLSCKASGYTFTSYWMHWVKQRPGQGLEWIGNINPSNGGTNYNEKFKSKATLTVDRSSSTAYMQLSSLTSEDSAVYYCAVPNWDDVMDYWGQGTSVTVSS

SEQ ID NO: 3617 - protein, 108 aa, synthetic construct
  REGION 1..108: note = VK P8-C2
QIVLTQSPPIMSASPGERVTMTCSASSSVSSSYLFWYQQKPGSSPQVWIYSTSNLASGVPTRFSGSGSGTSYSLTISSMEAEDAATYYCQQYSGYSFTFGAGTKLEMK

SEQ ID NO: 3618 - protein, 8 aa, synthetic construct
  REGION 1..8: note = CDR_H1 P7-F12
GYTFTSYW

SEQ ID NO: 3619 - protein, 8 aa, synthetic construct
  REGION 1..8: note = CDR_H2 P7-F12
INPSNGGT

SEQ ID NO: 3620 - protein, 11 aa, synthetic construct
  REGION 1..11: note = CDR_H3 P7-F12
AYGDYEGETDY

SEQ ID NO: 3621 - protein, 7 aa, synthetic construct
  REGION 1..7: note = CDR_L1 P7-F12
SSVSSTY

SEQ ID NO: 3622 - skipped

SEQ ID NO: 3623 - protein, 9 aa, synthetic construct
  REGION 1..9: note = CDR_L3 P7-F12
QQYSGYPLT

SEQ ID NO: 3624 - DNA, 723 bp, synthetic construct
  misc_feature 1..723: note = DNA P7-F12
  source 1..723: mol_type = other DNA
gaggtccaactgcagcagcctggggctgaactggtgaagcctggggcttcagtgaagctgtcctgcaaggcttctggctacaccttcaccagctactggatgcactgggtgaagcagaggcctggacaaggccttgagtggattggaaatattaatcctagcaatggtggtactaactacaatgagaagttcaagagcaaggccacactgactgtagacaaatcctccagcacagcctacatgcaactcagcagcctgacatatgaggactctgcggtctattactgtgcctatggtgactacgaaggtgagacggactactggggccaaggcaccagtctcacagtctcctcagggtcgacaaagcttgaagaaggtgaattttcagaagcatccggagacattgtgctgacccaatctccagcactcatggctgcatctccaggggagaaggtcaccatcacctgcagggccagctcaagtgtaagttccacttacttgcactggtaccagcagaagtcaggtgcctcccccaaagtctggatttatagcacatccaacttggcttctggagtccctgctcgcttcagtggcagtgggtctgggacctcttactctctcacaatcaacagtgtggaggctgaagatgctgccacttattactgccagcagtacagtggttacccactcacgttcggaggggggaccaagctggagctgaaa

SEQ ID NO: 3625 - protein, 118 aa, synthetic construct
  REGION 1..118: note = VH P7-F12
EVQLQQPGAELVKPGASVKLSCKASGYTFTSYWMHWVKQRPGQGLEWIGNINPSNGGTNYNEKFKSKATLTVDKSSSTAYMQLSSLTYEDSAVYYCAYGDYEGETDYWGQGTSLTVSS

SEQ ID NO: 3626 - protein, 108 aa, synthetic construct
  REGION 1..108: note = VK P7-F12
DIVLTQSPALMAASPGEKVTITCRASSSVSSTYLHWYQQKSGASPKVWIYSTSNLASGVPARFSGSGSGTSYSLTINSVEAEDAATYYCQQYSGYPLTFGGGTKLELK

SEQ ID NO: 3627 - protein, 8 aa, synthetic construct
  REGION 1..8: note = CDR_H1 P2-H7
GYTFTSYW

SEQ ID NO: 3628 - protein, 8 aa, synthetic construct
  REGION 1..8: note = CDR_H2 P2-H7
IDPNSGGT

SEQ ID NO: 3629 - protein, 11 aa, synthetic construct
  REGION 1..11: note = CDR_H3 P2-H7
AYGDYEGGTDY

SEQ ID NO: 3630 - protein, 7 aa, synthetic construct
  REGION 1..7: note = CDR_L1 P2-H7
SSVSSSY

SEQ ID NO: 3631 - skipped

SEQ ID NO: 3632 - protein, 11 aa, synthetic construct
  REGION 1..11: note = CDR_L3 P2-H7
QQYSGYPSMYT

SEQ ID NO: 3633 - DNA, 729 bp, synthetic construct
  misc_feature 1..729: note = DNA P2-H7
  source 1..729: mol_type = other DNA
gaggtccaactgcagcagcctggggctgagctggtgaggcctggggcttcagtgaagctgtcctgcaaggcttctggctacacgttcaccagctactggatgaactgggttaagcagaggcctgagcaaggccttgagtggattggaaggattgatcctaatagtggtggtactaagtacaatgagaagttcaagagcaaggccacactgactgtagacaaaccctccagcacagcctacatgcagctcagcagcctgacatctgaggactctgcggtctattactgtgcctatggtgactacgaaggtgggacggactactggggccaaggcaccactctcacagtctcctcagggtcgacaaagcttgaagaaggtgaattttcagaagcatccggacaaattgttctcacccagtctccagcaatcatgtctgcatctcctggggaacgggtcaccatgacctgcagtgccagctcaagtgtaagttccagctacttgtactggtaccagcagaagccaggatcctcccccaaactatggatttatagcacatccaacctggcttctggagtccctgctcgcttcagtggcagtgggtctgggacctcttattctctcacaatcagcagcatggaggctgaagatgctgccacttattactgccagcagtacagtggttacccatccatgtatacgttcggatcggggaccaagctggagctgaaa

SEQ ID NO: 3634 - protein, 118 aa, synthetic construct
  REGION 1..118: note = VH P2-H7
EVQLQQPGAELVRPGASVKLSCKASGYTFTSYWMNWVKQRPEQGLEWIGRIDPNSGGTKYNEKFKSKATLTVDKPSSTAYMQLSSLTSEDSAVYYCAYGDYEGGTDYWGQGTTLTVSS

SEQ ID NO: 3635 - protein, 110 aa, synthetic construct
  REGION 1..110: note = VK P2-H7
QIVLTQSPAIMSASPGERVTMTCSASSSVSSSYLYWYQQKPGSSPKLWIYSTSNLASGVPARFSGSGSGTSYSLTISSMEAEDAATYYCQQYSGYPSMYTFGSGTKLELK

SEQ ID NO: 3636 - protein, 8 aa, synthetic construct
  REGION 1..8: note = CDR_H1 P1-B7
GYTFTDYY

SEQ ID NO: 3637 - protein, 8 aa, synthetic construct
  REGION 1..8: note = CDR_H2 P1-B7
INPYNGGT

SEQ ID NO: 3638 - protein, 12 aa, synthetic construct
  REGION 1..12: note = CDR_H3 P1-B7
ETGYGSSFEGDY

SEQ ID NO: 3639 - protein, 11 aa, synthetic construct
  REGION 1..11: note = CDR_L1 P1-B7
QSLVHSNGNTY

SEQ ID NO: 3640 - skipped

SEQ ID NO: 3641 - protein, 9 aa, synthetic construct
  REGION 1..9: note = CDR_L3 P1-B7
SQSTHVPPT

SEQ ID NO: 3642 - DNA, 738 bp, synthetic construct
  misc_feature 1..738: note = DNA P1-B7
  source 1..738: mol_type = other DNA
gaggtccagctgcaacagtctggacctgtgctggtgaagcctggggcttcagtgaagatgtcctgtaaggcctccggatacacattcactgactactatatgaactgggtgaagcagagccatggaaagagccttgagtggattggagttattaatccttacaacggtggtactagctacaaccagaagttcaagggcaaggccacattgactgttgacaagtcctccagcacagcctacatggagctcaacagcctgacatctgaggactctgcagtctattactgtgaaaccggctacggtagtagcttcgagggtgactactggggccaaggcaccactctcacagtctcctcagggtcgacaaagcttgaagaaggtgaattttcagaagcatccggagatgttgtgatgacccaaactccactctccctgcctgtcagtcttggagatcaagcctccatctcttgcagatctagtcagagccttgtacacagtaatggaaacacctatttacattggtacctgcagaagccaggccagtctccaaagctcctgatctacaaagtttccaaccgattttctggggtcccagacaggttcagtggcagtggatcagggacagatttcacactcaagatcagcagagtggaggctgaggatctgggagtttatttctgctctcaaagtacacatgttcctccgacgttcggtggaggcaccaagctggaaatcaat

SEQ ID NO: 3643 - protein, 119 aa, synthetic construct
  REGION 1..119: note = VH P1-B7
EVQLQQSGPVLVKPGASVKMSCKASGYTFTDYYMNWVKQSHGKSLEWIGVINPYNGGTSYNQKFKGKATLTVDKSSSTAYMELNSLTSEDSAVYYCETGYGSSFEGDYWGQGTTLTVSS

SEQ ID NO: 3644 - protein, 112 aa, synthetic construct
  REGION 1..112: note = VK P1-B7
DVVMTQTPLSLPVSLGDQASISCRSSQSLVHSNGNTYLHWYLQKPGQSPKLLIYKVSNRFSGVPDRFSGSGSGTDFTLKISRVEAEDLGVYFCSQSTHVPPTFGGGTKLEIN

SEQ ID NO: 3645 - protein, 8 aa, synthetic construct
  REGION 1..8: note = CDR_H1 P2-D9
GFTFSDAW

SEQ ID NO: 3646 - protein, 10 aa, synthetic construct
  REGION 1..10: note = CDR_H2 P2-D9
IRNKANNHAT

SEQ ID NO: 3647 - protein, 6 aa, synthetic construct
  REGION 1..6: note = CDR_H3 P2-D9
ILARGY

SEQ ID NO: 3648 - protein, 7 aa, synthetic construct
  REGION 1..7: note = CDR_L1 P2-D9
SSISSNY

SEQ ID NO: 3649 - skipped

SEQ ID NO: 3650 - protein, 9 aa, synthetic construct
  REGION 1..9: note = CDR_L3 P2-D9
QQGRSIPYT

SEQ ID NO: 3651 - DNA, 714 bp, synthetic construct
  misc_feature 1..714: note = DNA P2-D9
  source 1..714: mol_type = other DNA
gaagtgaagcttgaggagtctggaggaggcttggtgcaacctggaggatccatgaaactctcttgtgctgcctctggattcacttttagtgacgcctggatggagtgggtccgccagtctccagagaaggggcttgagtgggttgctgaaattagaaacaaagctaataatcatgcaacatactatgctgagtctgtgaaagggaggttcaccatctcaagagatgattccaaaagtagtgtctacctgcaaatgaacagcttaagagctgaagacactggcatttattactgtattctggcccggggctactggggccaaggcaccactctcacagtctcctcagggtcgacaaagcttgaagaaggtgaattttcagaagcatccggagaaaatgtgctcacccagtctccaaccaccatggctgcatctcccggggagaagatcactatcacctgcagtgccagctcaagtataagttccaattacttgcattggtatcagcagaagccaggattctcccctaaactcttgatttataggacatccaatctggcttctggagtcccagctcgcttcagtggcagtgggtctgggacctcttactctctcacaattggcaccatggaggctgaagatgttgccacttactactgccagcagggtcgtagtataccgtacacgttcggaggggggaccaagctggaaatgaaa

SEQ ID NO: 3652 - protein, 115 aa, synthetic construct
  REGION 1..115: note = VH P2-D9
EVKLEESGGGLVQPGGSMKLSCAASGFTFSDAWMEWVRQSPEKGLEWVAEIRNKANNHATYYAESVKGRFTISRDDSKSSVYLQMNSLRAEDTGIYYCILARGYWGQGTTLTVSS

SEQ ID NO: 3653 - protein, 108 aa, synthetic construct
  REGION 1..108: note = VK P2-D9
ENVLTQSPTTMAASPGEKITITCSASSSISSNYLHWYQQKPGFSPKLLIYRTSNLASGVPARFSGSGSGTSYSLTIGTMEAEDVATYYCQQGRSIPYTFGGGTKLEMK

SEQ ID NO: 3654 - protein, 8 aa, synthetic construct
  REGION 1..8: note = CDR_H1 P6-E8
GFTFSDAW

SEQ ID NO: 3655 - protein, 10 aa, synthetic construct
  REGION 1..10: note = CDR_H2 P6-E8
IRNKANNHAT

SEQ ID NO: 3656 - protein, 7 aa, synthetic construct
  REGION 1..7: note = CDR_H3 P6-E8
TRAGTGY

SEQ ID NO: 3657 - protein, 10 aa, synthetic construct
  REGION 1..10: note = CDR_L1 P6-E8
ESVEYYGTSL

SEQ ID NO: 3658 - skipped

SEQ ID NO: 3659 - protein, 9 aa, synthetic construct
  REGION 1..9: note = CDR_L3 P6-E8
QQGRKVPWT

SEQ ID NO: 3660 - DNA, 726 bp, synthetic construct
  misc_feature 1..726: note = DNA P6-E8
  source 1..726: mol_type = other DNA
gaagtgaagcttgaggagtctggaggaggcttggtgcaacctggaggatccatgaaactctcttgtgctgcctctggattcacttttagtgacgcctggatggactgggtccgccagtctccagagaaggggcttgagtgggttgctgaaattagaaacaaagctaataatcatgcaacatactatgctgagtctgtgaaagggaggttcaccatctcaagagatgattccaaaagtagtgtctacctgcaaatgaacagtttaagagctgaagacactggcatttattactgtaccagagctgggacgggctactggggccaaggcaccagtctcacagtctcctcagggtcgacaaagcttgaagaaggtgaattttcagaagcatccggagaaattgtgctcacccagtctccagcttctttggctgtgtctctagggcagagagccaccatctcctgcagagccagtgaaagtgttgaatattatggcacaagtttaatgcagtggtaccaacagaaaccaggacagccacccaaactcctcatctatgctgcatccaacgtagaatctggggtccctgccaggtttagtggcagtgggtctgggacagacttcagcctcaacatccatcctgtggaggaggatgatattgcaatgtatttctgtcagcaaggtaggaaggttccttggacgttcggtggaggcaccaagctggaaatcaat

SEQ ID NO: 3661 - protein, 116 aa, synthetic construct
  REGION 1..116: note = VH P6-E8
EVKLEESGGGLVQPGGSMKLSCAASGFTFSDAWMDWVRQSPEKGLEWVAEIRNKANNHATYYAESVKGRFTISRDDSKSSVYLQMNSLRAEDTGIYYCTRAGTGYWGQGTSLTVSS

SEQ ID NO: 3662 - protein, 111 aa, synthetic construct
  REGION 1..111: note = VK P6-E8
EIVLTQSPASLAVSLGQRATISCRASESVEYYGTSLMQWYQQKPGQPPKLLIYAASNVESGVPARFSGSGSGTDFSLNIHPVEEDDIAMYFCQQGRKVPWTFGGGTKLEIN

SEQ ID NO: 3663 - protein, 8 aa, synthetic construct
  REGION 1..8: note = CDR_H1 P3-B9
GFTFSDAW

SEQ ID NO: 3664 - protein, 10 aa, synthetic construct
  REGION 1..10: note = CDR_H2 P3-B9
IRNKANNHAT

SEQ ID NO: 3665 - protein, 7 aa, synthetic construct
  REGION 1..7: note = CDR_H3 P3-B9
TRGGSPF

SEQ ID NO: 3666 - protein, 10 aa, synthetic construct
  REGION 1..10: note = CDR_L1 P3-B9
ESVEYYGTSL

SEQ ID NO: 3667 - skipped

SEQ ID NO: 3668 - protein, 9 aa, synthetic construct
  REGION 1..9: note = CDR_L3 P3-B9
QQGRKVPWT

SEQ ID NO: 3669 - DNA, 726 bp, synthetic construct
  misc_feature 1..726: note = DNA P3-B9
  source 1..726: mol_type = other DNA
gaagtgaagcttgaggagtctggaggaggcttggtgcaacctggaggatccatgaaactctcttgtgctgcctctggattcacttttagtgacgcctggatggactgggtccgccagtctccagagaaggggcttgagtgggttgctgaaattagaaacaaagctaataatcatgcaacatactatgctgagtctgtgaaagggaggttcaccatctcaagagatgattccaaaagtagtgtctacctgcaaatgaacagcttaagagctgaagacagtggcatttattactgtaccaggggcggtagtcccttctggggccaaggcaccactctcacagtctcctcagggtcgacaaagcttgaagaaggtgaattttcagaagcatccggacaaattgtgctcacccagtctccagcttctttggctgtgtctctagggcagagagccaccatctcctgcagagccagtgaaagtgttgaatattatggcacaagtttaatgcagtggtaccaacagaaaccaggacagccacccaaactcctcatctatgctgcatccaacgtagaatctggggtccctgccaggtttagtggcagtgggtctgggacagacttcagcctcaacatccatcctgtggaggaggatgatattgcaatgtatttctgtcagcaaggtaggaaggttccttggacgttcggtggaggcaccaagctggaaatcaat

SEQ ID NO: 3670 - protein, 116 aa, synthetic construct
  REGION 1..116: note = VH P3-B9
EVKLEESGGGLVQPGGSMKLSCAASGFTFSDAWMDWVRQSPEKGLEWVAEIRNKANNHATYYAESVKGRFTISRDDSKSSVYLQMNSLRAEDSGIYYCTRGGSPFWGQGTTLTVSS

SEQ ID NO: 3671 - protein, 111 aa, synthetic construct
  REGION 1..111: note = VK P3-B9
QIVLTQSPASLAVSLGQRATISCRASESVEYYGTSLMQWYQQKPGQPPKLLIYAASNVESGVPARFSGSGSGTDFSLNIHPVEEDDIAMYFCQQGRKVPWTFGGGTKLEIN

SEQ ID NO: 3672 - protein, 8 aa, synthetic construct
  REGION 1..8: note = CDR_H1 P1-G1
GFTFSDAW

SEQ ID NO: 3673 - protein, 10 aa, synthetic construct
  REGION 1..10: note = CDR_H2 P1-G1
IRNKANNHAT

SEQ ID NO: 3674 - protein, 7 aa, synthetic construct
  REGION 1..7: note = CDR_H3 P1-G1
TRGGTGY

SEQ ID NO: 3675 - protein, 10 aa, synthetic construct
  REGION 1..10: note = CDR_L1 P1-G1
KSVSTSSYSY

SEQ ID NO: 3676 - skipped

SEQ ID NO: 3677 - protein, 8 aa, synthetic construct
  REGION 1..8: note = CDR_l3 P1-G1
QQSREYPT

SEQ ID NO: 3678 - DNA, 723 bp, synthetic construct
  misc_feature 1..723: note = DNA P1-G1
  source 1..723: mol_type = other DNA
gaagtgaagcttgaggagtctggaggaggcttggtgcaacctggaggatccatgaaactctcttgtgctgcctctggattcacttttagtgacgcctggatggactgggtccgccagtctccagagaaggggcttgagtgggttgctgaaattagaaacaaagctaataatcatgcaacatactatgctgagtctgtgaaagggaggttcaccatctcaagagatgattccaaaagtagtgtctacctgcaaatgaacagcttaagagctgaagacactggcatttattactgtaccaggggggggacgggctactggggccaaggcaccagtctcacagtctcctcagggtcgacaaagcttgaagaaggtgaattttcagaagcatccggagatatccagatgacacagtctcctgcttccttagctgtatctctggggcagagggccaccatctcctgcagggccagcaaaagtgtcagtacatctagctatagttacatgcactggtaccaacagaaaccaggacagccgcccagactcctcatcaagtatgcatccaacctagaatctggggtccctgccaggttcagtggcagtgggtctgggacagacttcaccctcaacatccatcctgtggaggaggaggatgctgcaacatattactgtcagcaaagtagggaatatcccacgttcggtgctgggaccaagctggagctgaaa

SEQ ID NO: 3679 - protein, 116 aa, synthetic construct
  REGION 1..116: note = VH P1-G1
EVKLEESGGGLVQPGGSMKLSCAASGFTFSDAWMDWVRQSPEKGLEWVAEIRNKANNHATYYAESVKGRFTISRDDSKSSVYLQMNSLRAEDTGIYYCTRGGTGYWGQGTSLTVSS

SEQ ID NO: 3680 - protein, 110 aa, synthetic construct
  REGION 1..110: note = VK P1-G1
DIQMTQSPASLAVSLGQRATISCRASKSVSTSSYSYMHWYQQKPGQPPRLLIKYASNLESGVPARFSGSGSGTDFTLNIHPVEEEDAATYYCQQSREYPTFGAGTKLELK

SEQ ID NO: 3681 - protein, 8 aa, synthetic construct
  REGION 1..8: note = CDR_H1 P1-D11
GFTFSDAW

SEQ ID NO: 3682 - protein, 10 aa, synthetic construct
  REGION 1..10: note = CDR_H2 P1-D11
IRNKANNHAT

SEQ ID NO: 3683 - protein, 11 aa, synthetic construct
  REGION 1..11: note = CDR_H3 P1-D11
TRPGGGYYRDY

SEQ ID NO: 3684 - protein, 11 aa, synthetic construct
  REGION 1..11: note = CDR_L1 P1-D11
QSLVHSNGNTY

SEQ ID NO: 3685 - skipped

SEQ ID NO: 3686 - protein, 9 aa, synthetic construct
  REGION 1..9: note = CDR_L3 P1-D11
SQSRHVPYT

SEQ ID NO: 3687 - DNA, 741 bp, synthetic construct
  misc_feature 1..741: note = DNA P1-D11
  source 1..741: mol_type = other DNA
gaagtgaagcttgaggagtctggaggaggcttggtgcaacctggaggatccatgaaactctcttgtgcttcctgtggattcacttttagtgacgcctggatggactgggtccgccagtctccagagaaggggcttgagtgggttgctgaaattagaaacaaagctaataatcatgcaacatactatgctgagtctgtgaaagggaggttcaccatctcaagagatgattccaaaagtagtgtctacctgcaaatgaacagcttaagagctgaagacactggcatttattactgtaccaggccgggagggggttactaccgtgactactggggccaaggcaccagtctcacagtctcctcagggtcgacaaagcttgaagaaggtgaattttcagaagcatccggagatgttgtgatgacccaaactccactctccctgcctgtcagtcttggagatcaagcctccatctcttgcagatctagtcagagccttgtacacagtaatggaaacacctatttacattggtacctgcagaagccaggccagtctccacagctcctgatctacaaagtttccaaccgattttctggggtcccagacaggttcagtggcagtggatcagggacagatttcacactcaagatcagcagagtggaggctgaggatctgggagtttatttctgctctcaaagtagacatgttccgtacacgttcggaggggggaccaagctggagctgaaa

SEQ ID NO: 3688 - protein, 120 aa, synthetic construct
  REGION 1..120: note = VH P1-D11
EVKLEESGGGLVQPGGSMKLSCASCGFTFSDAWMDWVRQSPEKGLEWVAEIRNKANNHATYYAESVKGRFTISRDDSKSSVYLQMNSLRAEDTGIYYCTRPGGGYYRDYWGQGTSLTVSS

SEQ ID NO: 3689 - protein, 112 aa, synthetic construct
  REGION 1..112: note = VK P1-D11
DVVMTQTPLSLPVSLGDQASISCRSSQSLVHSNGNTYLHWYLQKPGQSPQLLIYKVSNRFSGVPDRFSGSGSGTDFTLKISRVEAEDLGVYFCSQSRHVPYTFGGGTKLELK

SEQ ID NO: 3690 - protein, 8 aa, synthetic construct
  REGION 1..8: note = CDR_H1 P8-E3
GFTFSDAW

SEQ ID NO: 3691 - protein, 10 aa, synthetic construct
  REGION 1..10: note = CDR_H2 P8-E3
IRNKANNHAT

SEQ ID NO: 3692 - protein, 11 aa, synthetic construct
  REGION 1..11: note = CDR_H3 P8-E3
TRPGGGYYRDY

SEQ ID NO: 3693 - protein, 11 aa, synthetic construct
  REGION 1..11: note = CDR_L1 P8-E3
QSLVHSNGNTY

SEQ ID NO: 3694 - skipped

SEQ ID NO: 3695 - protein, 9 aa, synthetic construct
  REGION 1..9: note = CDR_L3 P8-E3
SQSRHVPYT

SEQ ID NO: 3696 - DNA, 741 bp, synthetic construct
  misc_feature 1..741: note = DNA P8-E3
  source 1..741: mol_type = other DNA
gaagtgaagcttgaggagtctggaggaggcttggtgcaacctggaggatccatgaaactctcttgtgctgcctctggattcacttttagtgacgcctggatggactgggtccgccagtctccagagaaggggcttgagtgggttgctgaaattagaaacaaagctaataatcatgcaacatactatgctgagtctgtgaaagggaggttcaccatctcaagagatgattccaaaagtagtgtctacctgcaaatgaacagcttaagagctgaagacactggcatttattactgtaccaggccgggagggggttactaccgtgactactggggccaaggcaccagtctcacagtctcctcagggtcgacaaagcttgaagaaggtgaattttcagaagcatccggagatgttgtgatgacccaaactccactctccctgcctgtcagtcttggagatcaagcctccatctcttgcagatctagtcagagccttgtacacagtaatggaaacacctatttacattggtacctgcagaagccaggccagtctccacagctcctgatctacaaagtttccaaccgattttctggggtcccagacaggttcagtggcagtggatcagggacagatttcacactcaagatcagcagagtggaggctgaggatctgggagtttatttctgctctcaaagtagacatgttccgtacacgttcggaggggggaccaagctggagctgaaa

SEQ ID NO: 3697 - protein, 120 aa, synthetic construct
  REGION 1..120: note = VH P8-E3
EVKLEESGGGLVQPGGSMKLSCAASGFTFSDAWMDWVRQSPEKGLEWVAEIRNKANNHATYYAESVKGRFTISRDDSKSSVYLQMNSLRAEDTGIYYCTRPGGGYYRDYWGQGTSLTVSS

SEQ ID NO: 3698 - protein, 112 aa, synthetic construct; identical to SEQ ID NO: 3689
  REGION 1..112: note = VK P8-E3

SEQ ID NO: 3699 - protein, 8 aa, synthetic construct
  REGION 1..8: note = CDR_H1 P4-E4
GFTFSDAW

SEQ ID NO: 3700 - protein, 10 aa, synthetic construct
  REGION 1..10: note = CDR_H2 P4-E4
IRNKANNHAT

SEQ ID NO: 3701 - protein, 9 aa, synthetic construct
  REGION 1..9: note = CDR_H3 P4-E4
TRPLLGEVY

SEQ ID NO: 3702 - protein, 10 aa, synthetic construct
  REGION 1..10: note = CDR_L1 P4-E4
KSVSTSGYSY

SEQ ID NO: 3703 - skipped

SEQ ID NO: 3704 - protein, 9 aa, synthetic construct
  REGION 1..9: note = CDR_L3 P4-E4
QHSRELPWT

SEQ ID NO: 3705 - DNA, 732 bp, synthetic construct
  misc_feature 1..732: note = DNA P4-E4
  source 1..732: mol_type = other DNA
gaagtgaagcttgaggagtctggaggaggcttggtgcaacctggaggatccatgaaactctcttgtgctgcctctggattcacttttagtgacgcctggatggactgggtccgccagtctccagagaaggggcttgagtgggttgctgaaattagaaacaaagctaataatcatgcaacacactatgctgagtctgtgaaagggaggttcaccatctcacgagatgattccaaaagtagtgtctacctgcaaatgaacagcttaagagttgaagacactggcatttattactgtaccaggcccttgctgggagaggtttattggggccaagggactctggtcactgtctctgcagggtcgacaaagcttgaagaaggtgaattttcagaagcatccggagacattgtgctgacccagtctcctgcttccttagctgtatctctggggcagagggccaccatctcatgcagggccagcaaaagtgtcagtacatctggctatagttatatgcactggtaccaacagaagccaggacagccacccaaactcctcatctatcttgcatccaacctagcatctggggtccctgccaggttcagtggcagtgggtctgggacagacttcaccctcaacatccatcctgtggaggaggaggatgctgcaacctattactgtcagcacagtagggagcttccgtggacgttcggtggaggcaccaagctggaaatcaat

SEQ ID NO: 3706 - protein, 118 aa, synthetic construct
  REGION 1..118: note = VH P4-E4
EVKLEESGGGLVQPGGSMKLSCAASGFTFSDAWMDWVRQSPEKGLEWVAEIRNKANNHATHYAESVKGRFTISRDDSKSSVYLQMNSLRVEDTGIYYCTRPLLGEVYWGQGTLVTVSA

SEQ ID NO: 3707 - protein, 111 aa, synthetic construct
  REGION 1..111: note = VK P4-E4
DIVLTQSPASLAVSLGQRATISCRASKSVSTSGYSYMHWYQQKPGQPPKLLIYLASNLASGVPARFSGSGSGTDFTLNIHPVEEEDAATYYCQHSRELPWTFGGGTKLEIN

SEQ ID NO: 3708 - protein, 8 aa, synthetic construct
  REGION 1..8: note = CDR_H1 P5-D12
GFTFSDAW

SEQ ID NO: 3709 - protein, 10 aa, synthetic construct
  REGION 1..10: note = CDR_H2
IRSKANNHAT

SEQ ID NO: 3710 - protein, 7 aa, synthetic construct
  REGION 1..7: note = CDR_H3 P5-D12
TRSGTAY

SEQ ID NO: 3711 - protein, 10 aa, synthetic construct
  REGION 1..10: note = CDR_L1 P5-D12
ESVEYYDTSL

SEQ ID NO: 3712 - skipped

SEQ ID NO: 3713 - protein, 9 aa, synthetic construct
  REGION 1..9: note = CDR_L3 P5-D12
QQGRKVPWT

SEQ ID NO: 3714 - DNA, 726 bp, synthetic construct
  misc_feature 1..726: note = DNA P5-D12
  source 1..726: mol_type = other DNA
gaagtgaagcttgaggagtctggaggaggcttggtgcaacctggaggatccatgaaactctcttgtgctgcctctggattcacttttagtgacgcctggatggactgggtccgccagtctccagagaaggggcttgagtgggttgctgaaattagaagcaaagctaataatcatgcaacatactatgctgagtctgtgaaagggaggttcaccatctcaagagatgattccaaaagtagtgtctacctgcaaatgaacagcttaagagctgaagacactggcgtttattactgtaccaggtctgggacggcctactggggccaaggcaccagtctcacagtctcctcagggtcgacaaagcttgaagaaggtgaattttcagaagcatccggacaaattgttctcacccagtctccagcttctttggctgtgtctctagggcagagtgtcaccatctcctgcagagccagtgaaagtgttgaatattatgacactagtttaatgcagtggtaccaacagaaaccaggacagccacccaaactcctcatctatggtgcatccaacgtagaatctggggtccctgccaggtttagtggcagtgggtctgggacagacttcagcctcaacatccatcctgtggaggaggatgatattgcaatgtatttctgtcagcaaggtaggaaggttccttggacgttcggtggaggcaccaagctggaaatcaat

SEQ ID NO: 3715 - protein, 116 aa, synthetic construct
  REGION 1..116: note = VH P5-D12
EVKLEESGGGLVQPGGSMKLSCAASGFTFSDAWMDWVRQSPEKGLEWVAEIRSKANNHATYYAESVKGRFTISRDDSKSSVYLQMNSLRAEDTGVYYCTRSGTAYWGQGTSLTVSS

SEQ ID NO: 3716 - protein, 111 aa, synthetic construct
  REGION 1..111: note = VK P5-D12
QIVLTQSPASLAVSLGQSVTISCRASESVEYYDTSLMQWYQQKPGQPPKLLIYGASNVESGVPARFSGSGSGTDFSLNIHPVEEDDIAMYFCQQGRKVPWTFGGGTKLEIN

SEQ ID NO: 3717 - protein, 8 aa, synthetic construct
  REGION 1..8: note = CDR_H1 P3-F4
GFTFSDAW

SEQ ID NO: 3718 - protein, 10 aa, synthetic construct
  REGION 1..10: note = CDR_H2 P3-F4
IRNKANNHAT

SEQ ID NO: 3719 - protein, 6 aa, synthetic construct
  REGION 1..6: note = CDR_H3 P3-F4
VTGTGY

SEQ ID NO: 3720 - protein, 10 aa, synthetic construct
  REGION 1..10: note = CDR_L1 P3-F4
KSVSTSGDSY

SEQ ID NO: 3721 - skipped

SEQ ID NO: 3722 - protein, 9 aa, synthetic construct
  REGION 1..9: note = CDR_L3 P3-F4
QHSRELPWT

SEQ ID NO: 3723 - DNA, 723 bp, synthetic construct
  misc_feature 1..723: note = DNA P3-F4
  source 1..723: mol_type = other DNA
gaagtgaagcttgaggagtctggaggaggcttggtgcagcctggaggatccatgaaactctcttgtgctgcctctggattcacttttagtgacgcctggatggaatgggtccgccagtctccagagaaggggcttgagtgggtggctgaaattagaaacaaagctaataatcatgcaacacactatgttgagtctgtgaaagggaggttcaccatttcaagagatgattccaaaagtagtgtttacctgcaaatgaacagcttaagagctgaagacactggcatttattactgtgtaactgggacgggctactggggccagggcaccagtctcacagtctcctcagggtcgacaaagcttgaagaaggtgaattttcagaagcatccggagatatcaagatgacacagtctcctgcttccttagctgtatctctggggcagagggccaccatctcatgcagggccagcaaaagtgtcagtacatctggcgatagttatatgcactggtaccaacagaaaccaggacagccacccaaactcctcatctatcttgcatccaacctagaatctggggtccctgccaggttcagtggcagtgggtctgggacagacttcaccctcaacatccatcctgtggaggaggaggatgctgcaacctattactgtcagcacagtagggagcttccgtggacgttcggtggaggcaccaagctggaaatcaat

SEQ ID NO: 3724 - protein, 115 aa, synthetic construct
  REGION 1..115: note = VH P3-F4
EVKLEESGGGLVQPGGSMKLSCAASGFTFSDAWMEWVRQSPEKGLEWVAEIRNKANNHATHYVESVKGRFTISRDDSKSSVYLQMNSLRAEDTGIYYCVTGTGYWGQGTSLTVSS

SEQ ID NO: 3725 - protein, 111 aa, synthetic construct
  REGION 1..111: note = VK P3-P4
DIKMTQSPASLAVSLGQRATISCRASKSVSTSGDSYMHWYQQKPGQPPKLLIYLASNLESGVPARFSGSGSGTDFTLNIHPVEEEDAATYYCQHSRELPWTFGGGTKLEIN

SEQ ID NO: 3726 - protein, 8 aa, synthetic construct
  REGION 1..8: note = CDR_H1 P6-H2
GFTFSDAW

SEQ ID NO: 3727 - protein, 10 aa, synthetic construct
  REGION 1..10: note = CDR_H2 P6-H2
IRNKANNHAT

SEQ ID NO: 3728 - protein, 6 aa, synthetic construct
  REGION 1..6: note = CDR_H3 P6-H2
VTGTGY

SEQ ID NO: 3729 - protein, 5 aa, synthetic construct
  REGION 1..5: note = CDR_L1 P6-H2
SSVNY

SEQ ID NO: 3730 - skipped

SEQ ID NO: 3731 - protein, 9 aa, synthetic construct
  REGION 1..9: note = CDR_L3 P6-H2
QQGRSIPYT

SEQ ID NO: 3732 - DNA, 708 bp, synthetic construct
  misc_feature 1..708: note = DNA P6-H2
  source 1..708: mol_type = other DNA
gaagtgaagcttgaggagtctggaggaggcttggtgcaacctggaggatccatgaaactctcttgtgctgcctctggattcacttttagtgacgcctggatggagtgggtccgccagtctccagagaaggggcttgagtgggttgctgaaattagaaacaaagctaataatcatgcaacatactatgctgagtctgtgaaagggaggttcaccatctcaagagatgattccaaaagtagtgtctacctgcaaatgaacagcttaagagctgaagacactggcatttattactgtgtaactgggacgggctactggggccaaggcaccagtctcacagtctcctcagggtcgacaaagcttgaagaaggtgaattttcagaagcatccggagaaaatgtgctcacccagtctccagcaatcatgtctgcaactctaggggagaaggtcaccatgagctgcagggccagctcaagtgtaaattacatgtactggtaccagcagaagtcagatgcctcccccaaactatggatttattacacatccaacctggctcctggagtcccagctcgcttcagtggcagtgggtctgggaactcttattctctcacaatcagcagcatggaggctgaagatgttgccacttactactgccagcagggtcgtagtataccgtacacgttcggagggggcaccaagctggaaatcaat

SEQ ID NO: 3733 - protein, 115 aa, synthetic construct
  REGION 1..115: note = VH P6-H2
EVKLEESGGGLVQPGGSMKLSCAASGFTFSDAWMEWVRQSPEKGLEWVAEIRNKANNHATYYAESVKGRFTISRDDSKSSVYLQMNSLRAEDTGIYYCVTGTGYWGQGTSLTVSS

SEQ ID NO: 3734 - protein, 106 aa, synthetic construct
  REGION 1..106: note = VK P6-H2
ENVLTQSPAIMSATLGEKVTMSCRASSSVNYMYWYQQKSDASPKLWIYYTSNLAPGVPARFSGSGSGNSYSLTISSMEAEDVATYYCQQGRSIPYTFGGGTKLEIN

SEQ ID NO: 3735 - protein, 8 aa, synthetic construct
  REGION 1..8: note = CDR_H1 P1-E9
GFTFSDAW

SEQ ID NO: 3736 - protein, 10 aa, synthetic construct
  REGION 1..10: note = CDR_H2 P1-E9
IRNKANNHAT

SEQ ID NO: 3737 - protein, 6 aa, synthetic construct
  REGION 1..6: note = CDR_H3 P1-E9
VTGTGY

SEQ ID NO: 3738 - protein, 7 aa, synthetic construct
  REGION 1..7: note = CDR_L1 P1-E9
SSISSNY

SEQ ID NO: 3739 - skipped

SEQ ID NO: 3740 - protein, 9 aa, synthetic construct
  REGION 1..9: note = CDR_L3 P1-E9
QQGSSIPRT

SEQ ID NO: 3741 - DNA, 714 bp, synthetic construct
  misc_feature 1..714: note = DNA P1-E9
  source 1..714: mol_type = other DNA
gaagtgaagcttgaggagtctggaggaggcttggtgcaacctggaggatccatgaaactctcttgtgctgcctctggattcacttttagtgacgcctggatggagtgggtccgccagtctccagagaaggggcttgagtgggttgctgaaattagaaacaaagctaataatcatgcaacatactatgctgagtctgtgaaagggaggttcaccatctcaagagatgattccaaaagtagtgtctacctgcaaatgaacagcttaagagctgaagacactggcatttattactgtgtaactgggacgggctactggggccaaggcaccactctcacagtctcctcagggtcgacaaagcttgaagaaggtgaattttcagaagcatccggacaaattgttctcacccagtctccaaccaccatggctgcatctcccggggagaagatcactatcacctgcagtgccagctcaagtataagttccaattacttgcattggtatcagcagaagccaggattctcccctaaactcttgatttataggacatccaatctggcttctggagtcccagctcgcttcagtggcagtgggtctgggacctcttactctctcacaattggcaccatggaggctgaagatgttgccacttactactgccagcagggtagtagtataccacgcacgttcggaggggggaccaagctggaaatgaaa

SEQ ID NO: 3742 - protein, 115 aa, synthetic construct
  REGION 1..115: note = VH P1-E9
EVKLEESGGGLVQPGGSMKLSCAASGFTFSDAWMEWVRQSPEKGLEWVAEIRNKANNHATYYAESVKGRFTISRDDSKSSVYLQMNSLRAEDTGIYYCVTGTGYWGQGTTLTVSS

SEQ ID NO: 3743 - protein, 108 aa, synthetic construct
  REGION 1..108: note = VK P1-E9
QIVLTQSPTTMAASPGEKITITCSASSSISSNYLHWYQQKPGFSPKLLIYRTSNLASGVPARFSGSGSGTSYSLTIGTMEAEDVATYYCQQGSSIPRTFGGGTKLEMK

SEQ ID NO: 3744 - protein, 8 aa, synthetic construct
  REGION 1..8: note = CDR_H1 P8-D9
GFTFSDAW

SEQ ID NO: 3745 - protein, 10 aa, synthetic construct
  REGION 1..10: note = CDR_H2 P8-D9
IRNKANNHAT

SEQ ID NO: 3746 - protein, 6 aa, synthetic construct
  REGION 1..6: note = CDR_H3 P8-D9
VTGTGY

SEQ ID NO: 3747 - protein, 7 aa, synthetic construct
  REGION 1..7: note = CDR_L1 P8-D9
SSISSNY

SEQ ID NO: 3748 - skipped

SEQ ID NO: 3749 - protein, 9 aa, synthetic construct
  REGION 1..9: note = CDR_L3 P8-D9
QQGSSIPRT

SEQ ID NO: 3750 - DNA, 714 bp, synthetic construct; identical to SEQ ID NO: 3741
  misc_feature 1..714: note = DNA P8-D9
  source 1..714: mol_type = other DNA

SEQ ID NO: 3751 - protein, 115 aa, synthetic construct; identical to SEQ ID NO: 3742
  REGION 1..115: note = VH P8-D9

SEQ ID NO: 3752 - protein, 108 aa, synthetic construct; identical to SEQ ID NO: 3743
  REGION 1..108: note = VK P8-D9

SEQ ID NO: 3753 - protein, 8 aa, synthetic construct
  REGION 1..8: note = CDR_H1 P4-G11
GFTFSDAW

SEQ ID NO: 3754 - protein, 10 aa, synthetic construct
  REGION 1..10: note = CDR_H2 P4-G11
IRNKANNHAT

SEQ ID NO: 3755 - protein, 6 aa, synthetic construct
  REGION 1..6: note = CDR_H3 P4-G11
VTGTGY

SEQ ID NO: 3756 - protein, 7 aa, synthetic construct
  REGION 1..7: note = CDR_L1 P4-G11
SSISSNS

SEQ ID NO: 3757 - skipped

SEQ ID NO: 3758 - protein, 9 aa, synthetic construct
  REGION 1..9: note = CDR_L3 P4-G11
QQGSSIPVT

SEQ ID NO: 3759 - DNA, 714 bp, synthetic construct
  misc_feature 1..714: note = DNA P4-G11
  source 1..714: mol_type = other DNA
gaagtgaagcttgaggagtctggaggaggcttggtgcaacctggaggatccatgaaactctcttgtgctgcctctggattcacttttagtgacgcctggatggaatgggtccgccagtctccagagaaggggcttgagtgggtggctgaaattagaaacaaagctaataatcatgcaacacactatgttgagtctgtgaaagggaggttcaccatttcaagagatgattccaaaagtagtgtttacctgcaaatgaacagcttaagagctgaagacactggcatttattactgtgtaactgggacgggctactggggccagggcaccagtctcacagtctcctcagggtcgacaaagcttgaagaaggtgaattttcagaagcatccggacaaaatgtgctcacccagtctccaaccaccatggctgcatctcccggggagagtatcactatcacctgcagtgccagctcaagtataagttccaattccttgcattggtatcagcagaagccaggattctcccctaaactcttgatttataggacatccaatctggcttctggagtcccagctcgcttcagtggcagtgggtctgggacctcttactctctcacaattggcaccatggaggctgaagatgttgccacttactactgccagcagggtagtagtataccggtcacgttcggtgctgggaccaagctggagctgaaa

SEQ ID NO: 3760 - protein, 115 aa, synthetic construct; identical to SEQ ID NO: 3724
  REGION 1..115: note = VH P4-G11

SEQ ID NO: 3761 - protein, 108 aa, synthetic construct
  REGION 1..108: note = VK P4-G11
QNVLTQSPTTMAASPGESITITCSASSSISSNSLHWYQQKPGFSPKLLIYRTSNLASGVPARFSGSGSGTSYSLTIGTMEAEDVATYYCQQGSSIPVTFGAGTKLELK

SEQ ID NO: 3762 - protein, 109 aa, synthetic construct
  REGION 1..109: note = Fab001 LC
DIQMTQSPSSLSASVGDRVTITCRASQSVSSAVAWYQQKPGKAPKLLIYSASSLYSGVPSRFSGSRSGTDFTLTISSLQPEDFATYYCQQWWYSGSLVTFGQGTKVEIK

SEQ ID NO: 3763 - protein, 11 aa, synthetic construct
  REGION 1..11: note = Fab001 LC L1
RASQSVSSAVA

SEQ ID NO: 3764 - protein, 7 aa, synthetic construct
  REGION 1..7: note = Fab001 LC L2
SASSLYS

SEQ ID NO: 3765 - protein, 11 aa, synthetic construct
  REGION 1..11: note = Fab001 LC L3
QQWWYSGSLVT

SEQ ID NO: 3766 - protein, 128 aa, synthetic construct
  REGION 1..128: note = Fab001 HC
EVQLVESGGGLVQPGGSLRLSCAASGFNVSYSSIHWVRQAPGKGLEWVASIYSSYGYTYYADSVKGRFTISADTSKNTAYLQMNSLRAEDTAVYYCARSHEEYYHMYYPSYEYAMDYWGQGTLVTVSS

SEQ ID NO: 3767 - protein, 5 aa, synthetic construct
  REGION 1..5: note = Fab001 HC H1
YSSIH

SEQ ID NO: 3768 - protein, 17 aa, synthetic construct
  REGION 1..17: note = Fab001 HC H2
SIYSSYGYTYYADSVKG

SEQ ID NO: 3769 - protein, 19 aa, synthetic construct
  REGION 1..19: note = Fab001 HC H3
SHEEYYHMYYPSYEYAMDY

SEQ ID NO: 3770 - protein, 108 aa, synthetic construct
  REGION 1..108: note = Fab002 LC
DIQMTQSPSSLSASVGDRVTITCRASQSVSSAVAWYQQKPGKAPKLLIYSASSLYSGVPSRFSGSRSGTDFTLTISSLQPEDFATYYCQQWDSFLLITFGQGTKVEIK

SEQ ID NO: 3771 - protein, 11 aa, synthetic construct
  REGION 1..11: note = Fab002 LC L1
RASQSVSSAVA

SEQ ID NO: 3772 - protein, 7 aa, synthetic construct
  REGION 1..7: note = Fab002 LC L2
SASSLYS

SEQ ID NO: 3773 - protein, 10 aa, synthetic construct
  REGION 1..10: note = Fab002 LC L3
QQWDSFLLIT

SEQ ID NO: 3774 - protein, 124 aa, synthetic construct
  REGION 1..124: note = Fab002 HC
EVQLVESGGGLVQPGGSLRLSCAASGFNIYSSSIHWVRQAPGKGLEWVASISSYYGSTYYADSVKGRFTISADTSKNTAYLQMNSLRAEDTAVYYCARSSYEYYWPEYWAIDYWGQGTLVTVSS

SEQ ID NO: 3775 - protein, 5 aa, synthetic construct
  REGION 1..5: note = Fab002 HC H1
SSSIH

SEQ ID NO: 3776 - protein, 17 aa, synthetic construct
  REGION 1..17: note = Fab002 HC H2
SISSYYGSTYYADSVKG

SEQ ID NO: 3777 - protein, 15 aa, synthetic construct
  REGION 1..15: note = Fab002 HC H3
SSYEYYWPEYWAIDY

SEQ ID NO: 3778 - protein, 107 aa, synthetic construct
  REGION 1..107: note = Fab003 LC
DIQMTQSPSSLSASVGDRVTITCRASQSVSSAVAWYQQKPGKAPKLLIYSASSLYSGVPSRFSGSRSGTDFTLTISSLQPEDFATYYCQQSYGFLVTFGQGTKVEIK

SEQ ID NO: 3779 - protein, 11 aa, synthetic construct
  REGION 1..11: note = Fab003 LC L1
RASQSVSSAVA

SEQ ID NO: 3780 - protein, 7 aa, synthetic construct
  REGION 1..7: note = Fab003 LC L2
SASSLYS

SEQ ID NO: 3781 - protein, 9 aa, synthetic construct
  REGION 1..9: note = Fab003 LC L3
QQSYGFLVT

SEQ ID NO: 3782 - protein, 123 aa, synthetic construct
  REGION 1..123: note = Fab003 HC
EVQLVESGGGLVQPGGSLRLSCAASGFNFYSYSIHWVRQAPGKGLEWVASIYSYYGSTYYADSVKGRFTISADTSKNTAYLQMNSLRAEDTAVYYCARGFGYPDWPAYGLDYWGQGTLVTVSS

SEQ ID NO: 3783 - protein, 5 aa, synthetic construct
  REGION 1..5: note = Fab003 HC H1
SYSIH

SEQ ID NO: 3784 - protein, 17 aa, synthetic construct
  REGION 1..17: note = Fab003 HC H2
SIYSYYGSTYYADSVKG

SEQ ID NO: 3785 - protein, 14 aa, synthetic construct
  REGION 1..14: note = Fab003 HC H3
GFGYPDWPAYGLDY

SEQ ID NO: 3786 - protein, 108 aa, synthetic construct
  REGION 1..108: note = Fab004 LC
DIQMTQSPSSLSASVGDRVTITCRASQSVSSAVAWYQQKPGKAPKLLIYSASSLYSGVPSRFSGSRSGTDFTLTISSLQPEDFATYYCQQMDFYSLITFGQGTKVEIK

SEQ ID NO: 3787 - protein, 11 aa, synthetic construct
  REGION 1..11: note = Fab004 LC L1
RASQSVSSAVA

SEQ ID NO: 3788 - protein, 7 aa, synthetic construct
  REGION 1..7: note = Fab004 LC L2
SASSLYS

SEQ ID NO: 3789 - protein, 10 aa, synthetic construct
  REGION 1..10: note = Fab004 LC L3
QQMDFYSLIT

SEQ ID NO: 3790 - protein, 123 aa, synthetic construct
  REGION 1..123: note = Fab004 HC
EVQLVESGGGLVQPGGSLRLSCAASGFNVSSYSIHWVRQAPGKGLEWVASISPYSGSTYYADSVKGRFTISADTSKNTAYLQMNSLRAEDTAVYYCARYMYSEYYIGYAMDYWGQGTLVTVSS

SEQ ID NO: 3791 - protein, 5 aa, synthetic construct
  REGION 1..5: note = Fab004 HC H1
SYSIH

SEQ ID NO: 3792 - protein, 17 aa, synthetic construct
  REGION 1..17: note = Fab004 HC H2
SISPYSGSTYYADSVKG

SEQ ID NO: 3793 - protein, 14 aa, synthetic construct
  REGION 1..14: note = Fab004 HC H3
YMYSEYYIGYAMDY

SEQ ID NO: 3794 - protein, 107 aa, synthetic construct
  REGION 1..107: note = Fab005 LC
DIQMTQSPSSLSASVGDRVTITCRASQSVSSAVAWYQQKPGKAPKLLIYSASSLYSGVPSRFSGSRSGTDFTLTISSLQPEDFATYYCQQGGYSLITFGQGTKVEIK

SEQ ID NO: 3795 - protein, 11 aa, synthetic construct
  REGION 1..11: note = Fab005 LC L1
RASQSVSSAVA

SEQ ID NO: 3796 - protein, 7 aa, synthetic construct
  REGION 1..7: note = Fab005 LC L2
SASSLYS

SEQ ID NO: 3797 - protein, 9 aa, synthetic construct
  REGION 1..9: note = Fab005 LC L3
QQGGYSLIT

SEQ ID NO: 3798 - protein, 127 aa, synthetic construct
  REGION 1..127: note = Fab005 HC
EVQLVESGGGLVQPGGSLRLSCAASGFNVSSYSIHWVRQAPGKGLEWVASISPYYGSTYYADSVKGRFTISADTSKNTAYLQMNSLRAEDTAVYYCARYYEWYKYYLYMGYMGFDYWGQGTLVTVSS

SEQ ID NO: 3799 - protein, 5 aa, synthetic construct
  REGION 1..5: note = Fab005 HC H1
SYSIH

SEQ ID NO: 3800 - protein, 17 aa, synthetic construct
  REGION 1..17: note = Fab005 HC H2
SISPYYGSTYYADSVKG

SEQ ID NO: 3801 - protein, 18 aa, synthetic construct
  REGION 1..18: note = Fab005 HC H3
YYEWYKYYLYMGYMGFDY

SEQ ID NO: 3802 - protein, 107 aa, synthetic construct
  REGION 1..107: note = Fab006 LC
DIQMTQSPSSLSASVGDRVTITCRASQSVSSAVAWYQQKPGKAPKLLIYSASSLYSGVPSRFSGSRSGTDFTLTISSLQPEDFATYYCQQSFWVPFTFGQGTKVEIK

SEQ ID NO: 3803 - protein, 11 aa, synthetic construct
  REGION 1..11: note = Fab006 LC L1
RASQSVSSAVA

SEQ ID NO: 3804 - protein, 7 aa, synthetic construct
  REGION 1..7: note = Fab006 LC L2
SASSLYS

SEQ ID NO: 3805 - protein, 9 aa, synthetic construct
  REGION 1..9: note = Fab006 LC L3
QQSFWVPFT

SEQ ID NO: 3806 - protein, 123 aa, synthetic construct
  REGION 1..123: note = Fab006 HC
EVQLVESGGGLVQPGGSLRLSCAASGFNVYSSSIHWVRQAPGKGLEWVASIYSSSGYTSYADSVKGRFTISADTSKNTAYLQMNSLRAEDTAVYYCARWYPYYDWYGSALDYWGQGTLVTVSS

SEQ ID NO: 3807 - protein, 5 aa, synthetic construct
  REGION 1..5: note = Fab006 HC H1
SSSIH

SEQ ID NO: 3808 - protein, 17 aa, synthetic construct
  REGION 1..17: note = Fab006 HC H2
SIYSSSGYTSYADSVKG

SEQ ID NO: 3809 - protein, 14 aa, synthetic construct
  REGION 1..14: note = Fab006 HC H3
WYPYYDWYGSALDY

SEQ ID NO: 3810 - protein, 107 aa, synthetic construct
  REGION 1..107: note = Fab007 LC
DIQMTQSPSSLSASVGDRVTITCRASQSVSSAVAWYQQKPGKAPKLLIYSASSLYSGVPSRFSGSRSGTDFTLTISSLQPEDFATYYCQQSSSSLITFGQGTKVEIK

SEQ ID NO: 3811 - protein, 11 aa, synthetic construct
  REGION 1..11: note = Fab007 LC L1
RASQSVSSAVA

SEQ ID NO: 3812 - protein, 7 aa, synthetic construct
  REGION 1..7: note = Fab007 LC L2
SASSLYS

SEQ ID NO: 3813 - protein, 9 aa, synthetic construct
  REGION 1..9: note = Fab007 LC L3
QQSSSSLIT

SEQ ID NO: 3814 - protein, 129 aa, synthetic construct
  REGION 1..129: note = Fab007 HC
EVQLVESGGGLVQPGGSLRLSCAASGFNVSYSYIHWVRQAPGKGLEWVAYIYPSSGYTSYADSVKGRFTISADTSKNTAYLQMNSLRAEDTAVYYCARRVGYWPFMYWYYYPSYGLDYWGQGTLVTVSS

SEQ ID NO: 3815 - protein, 5 aa, synthetic construct
  REGION 1..5: note = Fab007 HC H1
YSYIH

SEQ ID NO: 3816 - protein, 17 aa, synthetic construct
  REGION 1..17: note = Fab007 HC H2
YIYPSSGYTSYADSVKG

SEQ ID NO: 3817 - protein, 20 aa, synthetic construct
  REGION 1..20: note = Fab007 HC H3
RVGYWPFMYWYYYPSYGLDY

SEQ ID NO: 3818 - protein, 107 aa, synthetic construct
  REGION 1..107: note = Fab008 LC
DIQMTQSPSSLSASVGDRVTITCRASQSVSSAVAWYQQKPGKAPKLLIYSASSLYSGVPSRFSGSRSGTDFTLTISSLQPEDFATYYCQQSDYTLVTFGQGTKVEIK

SEQ ID NO: 3819 - protein, 11 aa, synthetic construct
  REGION 1..11: note = Fab008 LC L1
RASQSVSSAVA

SEQ ID NO: 3820 - protein, 7 aa, synthetic construct
  REGION 1..7: note = Fab008 LC L2
SASSLYS

SEQ ID NO: 3821 - protein, 9 aa, synthetic construct
  REGION 1..9: note = Fab008 LC L3
QQSDYTLVT

SEQ ID NO: 3822 - protein, 126 aa, synthetic construct
  REGION 1..126: note = Fab008 HC
EVQLVESGGGLVQPGGSLRLSCAASGFNFSSSSIHWVRQAPGKGLEWVAYIYPYSGSTYYADSVKGRFTISADTSKNTAYLQMNSLRAEDTAVYYCARMKHGVSGYMYWIWAMDYWGQGTLVTVSS

SEQ ID NO: 3823 - protein, 5 aa, synthetic construct
  REGION 1..5: note = Fab008 HC H1
SSSIH

SEQ ID NO: 3824 - protein, 17 aa, synthetic construct
  REGION 1..17: note = Fab008 HC H2
YIYPYSGSTYYADSVKG

SEQ ID NO: 3825 - protein, 17 aa, synthetic construct
  REGION 1..17: note = Fab008 HC H3
MKHGVSGYMYWIWAMDY

SEQ ID NO: 3826 - protein, 107 aa, synthetic construct; identical to SEQ ID NO: 3810
  REGION 1..107: note = Fab009 LC

SEQ ID NO: 3827 - protein, 11 aa, synthetic construct
  REGION 1..11: note = Fab009 LC L1
RASQSVSSAVA

SEQ ID NO: 3828 - protein, 7 aa, synthetic construct
  REGION 1..7: note = Fab009 LC L2
SASSLYS

SEQ ID NO: 3829 - protein, 9 aa, synthetic construct
  REGION 1..9: note = Fab009 LC L3
QQSSSSLIT

SEQ ID NO: 3830 - protein, 124 aa, synthetic construct
  REGION 1..124: note = Fab009 HC
EVQLVESGGGLVQPGGSLRLSCAASGFNFSSSSIHWVRQAPGKGLEWVASISSSSGSTSYADSVKGRFTISADTSKNTAYLQMNSLRAEDTAVYYCARYSYQYYDWWYGALDYWGQGTLVTVSS

SEQ ID NO: 3831 - protein, 5 aa, synthetic construct
  REGION 1..5: note = Fab009 HC H1
SSSIH

SEQ ID NO: 3832 - protein, 17 aa, synthetic construct
  REGION 1..17: note = Fab009 HC H2
SISSSSGSTSYADSVKG

SEQ ID NO: 3833 - protein, 15 aa, synthetic construct
  REGION 1..15: note = Fab009 HC H3
YSYQYYDWWYGALDY

SEQ ID NO: 3834 - protein, 109 aa, synthetic construct
  REGION 1..109: note = Fab0010 LC
DIQMTQSPSSLSASVGDRVTITCRASQSVSSAVAWYQQKPGKAPKLLIYSASSLYSGVPSRFSGSRSGTDFTLTISSLQPEDFATYYCQQSHTSTVLLTFGQGTKVEIK

SEQ ID NO: 3835 - protein, 11 aa, synthetic construct
  REGION 1..11: note = Fab0010 LC L1
RASQSVSSAVA

SEQ ID NO: 3836 - protein, 7 aa, synthetic construct
  REGION 1..7: note = Fab0010 LC L2
SASSLYS

SEQ ID NO: 3837 - protein, 11 aa, synthetic construct
  REGION 1..11: note = Fab0010 LC L3
QQSHTSTVLLT

SEQ ID NO: 3838 - protein, 125 aa, synthetic construct
  REGION 1..125: note = Fab0010 HC
EVQLVESGGGLVQPGGSLRLSCAASGFNFSYSSIHWVRQAPGKGLEWVASIYPYSGSTYYADSVKGRFTISADTSKNTAYLQMNSLRAEDTAVYYCARSAYDYYNSDWVYALDYWGQGTLVTVSS

SEQ ID NO: 3839 - protein, 5 aa, synthetic construct
  REGION 1..5: note = Fab0010 HC H1
YSSIH

SEQ ID NO: 3840 - protein, 17 aa, synthetic construct
  REGION 1..17: note = Fab0010 HC H2
SIYPYSGSTYYADSVKG

SEQ ID NO: 3841 - protein, 16 aa, synthetic construct
  REGION 1..16: note = Fab0010 HC H3
SAYDYYNSDWVYALDY

SEQ ID NO: 3842 - protein, 107 aa, synthetic construct
  REGION 1..107: note = Fab0011 LC
DIQMTQSPSSLSASVGDRVTITCRASQSVSSAVAWYQQKPGKAPKLLIYSASSLYSGVPSRFSGSRSGTDFTLTISSLQPEDFATYYCQQDSHWLITFGQGTKVEIK

SEQ ID NO: 3843 - protein, 11 aa, synthetic construct
  REGION 1..11: note = Fab0011 LC L1
RASQSVSSAVA

SEQ ID NO: 3844 - protein, 7 aa, synthetic construct
  REGION 1..7: note = Fab0011 LC L2
SASSLYS

SEQ ID NO: 3845 - protein, 9 aa, synthetic construct
  REGION 1..9: note = Fab0011 LC L3
QQDSHWLIT

SEQ ID NO: 3846 - protein, 124 aa, synthetic construct
  REGION 1..124: note = Fab0011 HC
EVQLVESGGGLVQPGGSLRLSCAASGFNFYYSSIHWVRQAPGKGLEWVASIYSYSGSTSYADSVKGRFTISADTSKNTAYLQMNSLRAEDTAVYYCARDASGWLYKSMWAFDYWGQGTLVTVSS

SEQ ID NO: 3847 - protein, 5 aa, synthetic construct
  REGION 1..5: note = Fab0011 HC H1
YSSIH

SEQ ID NO: 3848 - protein, 17 aa, synthetic construct
  REGION 1..17: note = Fab0011 HC H2
SIYSYSGSTSYADSVKG

SEQ ID NO: 3849 - protein, 15 aa, synthetic construct
  REGION 1..15: note = Fab0011 HC H3
DASGWLYKSMWAFDY

SEQ ID NO: 3850 - protein, 107 aa, synthetic construct
  REGION 1..107: note = Fab0012 LC
DIQMTQSPSSLSASVGDRVTITCRASQSVSSAVAWYQQKPGKAPKLLIYSASSLYSGVPSRFSGSRSGTDFTLTISSLQPEDFATYYCQQYWFGLITFGQGTKVEIK

SEQ ID NO: 3851 - protein, 11 aa, synthetic construct
  REGION 1..11: note = Fab0012 LC L1
RASQSVSSAVA

SEQ ID NO: 3852 - protein, 7 aa, synthetic construct
  REGION 1..7: note = Fab0012 LC L2
SASSLYS

SEQ ID NO: 3853 - protein, 9 aa, synthetic construct
  REGION 1..9: note = Fab0012 LC L3
QQYWFGLIT

SEQ ID NO: 3854 - protein, 124 aa, synthetic construct
  REGION 1..124: note = Fab0012 HC
EVQLVESGGGLVQPGGSLRLSCAASGFNVSSYSIHWVRQAPGKGLEWVASISSSYGYTSYADSVKGRFTISADTSKNTAYLQMNSLRAEDTAVYYCARYNGATYDNLDFGLDYWGQGTLVTVSS

SEQ ID NO: 3855 - protein, 5 aa, synthetic construct
  REGION 1..5: note = Fab0012 HC H1
SYSIH

SEQ ID NO: 3856 - protein, 17 aa, synthetic construct
  REGION 1..17: note = Fab0012 HC H2
SISSSYGYTSYADSVKG

SEQ ID NO: 3857 - protein, 15 aa, synthetic construct
  REGION 1..15: note = Fab0012 HC H3
YNGATYDNLDFGLDY

SEQ ID NO: 3858 - protein, 109 aa, synthetic construct
  REGION 1..109: note = Fab0013 LC
DIQMTQSPSSLSASVGDRVTITCRASQSVSSAVAWYQQKPGKAPKLLIYSASSLYSGVPSRFSGSRSGTDFTLTISSLQPEDFATYYCQQSSFSTYPITFGQGTKVEIK

SEQ ID NO: 3859 - protein, 11 aa, synthetic construct
  REGION 1..11: note = Fab0013 LC L1
RASQSVSSAVA

SEQ ID NO: 3860 - protein, 7 aa, synthetic construct
  REGION 1..7: note = Fab0013 LC L2
SASSLYS

SEQ ID NO: 3861 - protein, 11 aa, synthetic construct
  REGION 1..11: note = Fab0013 LC L3
QQSSFSTYPIT

SEQ ID NO: 3862 - protein, 129 aa, synthetic construct
  REGION 1..129: note = Fab0013 HC
EVQLVESGGGLVQPGGSLRLSCAASGFNIYYSSIHWVRQAPGKGLEWVASISSYSGYTSYADSVKGRFTISADTSKNTAYLQMNSLRAEDTAVYYCARYEGYWYSTYWWAYQYVALDYWGQGTLVTVSS

SEQ ID NO: 3863 - protein, 5 aa, synthetic construct
  REGION 1..5: note = Fab0013 HC H1
YSSIH

SEQ ID NO: 3864 - protein, 17 aa, synthetic construct
  REGION 1..17: note = Fab0013 HC H2
SISSYSGYTSYADSVKG

SEQ ID NO: 3865 - protein, 20 aa, synthetic construct
  REGION 1..20: note = Fab0013 HC H3
YEGYWYSTYWWAYQYVALDY

SEQ ID NO: 3866 - protein, 108 aa, synthetic construct
  REGION 1..108: note = Fab0014 LC
DIQMTQSPSSLSASVGDRVTITCRASQSVSSAVAWYQQKPGKAPKLLIYSASSLYSGVPSRFSGSRSGTDFTLTISSLQPEDFATYYCQQMVMSYLITFGQGTKVEIK

SEQ ID NO: 3867 - protein, 11 aa, synthetic construct
  REGION 1..11: note = Fab0014 LC L1
RASQSVSSAVA

SEQ ID NO: 3868 - protein, 7 aa, synthetic construct
  REGION 1..7: note = Fab0014 LC L2
SASSLYS

SEQ ID NO: 3869 - protein, 10 aa, synthetic construct
  REGION 1..10: note = Fab0014 LC L3
QQMVMSYLIT

SEQ ID NO: 3870 - protein, 127 aa, synthetic construct
  REGION 1..127: note = Fab0014 HC
EVQLVESGGGLVQPGGSLRLSCAASGFNIYSSSIHWVRQAPGKGLEWVASIYSSYGSTYYADSVKGRFTISADTSKNTAYLQMNSLRAEDTAVYYCARLDYWSWPISPKRWGGLDYWGQGTLVTVSS

SEQ ID NO: 3871 - protein, 5 aa, synthetic construct
  REGION 1..5: note = Fab0014 HC H1
SSSIH

SEQ ID NO: 3872 - protein, 17 aa, synthetic construct
  REGION 1..17: note = Fab0014 HC H2
SIYSSYGSTYYADSVKG

SEQ ID NO: 3873 - protein, 18 aa, synthetic construct
  REGION 1..18: note = Fab0014 HC H3
LDYWSWPISPKRWGGLDY

SEQ ID NO: 3874 - protein, 107 aa, synthetic construct
  REGION 1..107: note = Fab0015 LC
DIQMTQSPSSLSASVGDRVTITCRASQSVSSAVAWYQQKPGKAPKLLIYSASSLYSGVPSRFSGSRSGTDFTLTISSLQPEDFATYYCQQSYCFLVTFGQGTKVEIK

SEQ ID NO: 3875 - protein, 11 aa, synthetic construct
  REGION 1..11: note = Fab0015 LC L1
RASQSVSSAVA

SEQ ID NO: 3876 - protein, 7 aa, synthetic construct
  REGION 1..7: note = Fab0015 LC L2
SASSLYS

SEQ ID NO: 3877 - protein, 9 aa, synthetic construct
  REGION 1..9: note = Fab0015 LC L3
QQSYCFLVT

SEQ ID NO: 3878 - protein, 123 aa, synthetic construct
  REGION 1..123: note = Fab0015 HC
EVQLVESGGGLVQPGGSLRLSCAASGFNFYSYSIHWVRQAPGKGLEWVASIYSYYGYTYYADSVKGRFTISADTSKNTAYLQMNSLRAEDTAVYYCARGFGYPDWPAYGLDYWGQGTLVTVSS

SEQ ID NO: 3879 - protein, 5 aa, synthetic construct
  REGION 1..5: note = Fab0015 HC H1
SYSIH

SEQ ID NO: 3880 - protein, 17 aa, synthetic construct
  REGION 1..17: note = Fab0015 HC H2
SIYSYYGYTYYADSVKG

SEQ ID NO: 3881 - protein, 14 aa, synthetic construct
  REGION 1..14: note = Fab0015 HC H3
GFGYPDWPAYGLDY

SEQ ID NO: 3882 - protein, 107 aa, synthetic construct; identical to SEQ ID NO: 3802
  REGION 1..107: note = Fab0016 LC

SEQ ID NO: 3883 - protein, 11 aa, synthetic construct
  REGION 1..11: note = Fab0016 LC L1
RASQSVSSAVA

SEQ ID NO: 3884 - protein, 7 aa, synthetic construct
  REGION 1..7: note = Fab0016 LC L2
SASSLYS

SEQ ID NO: 3885 - protein, 9 aa, synthetic construct
  REGION 1..9: note = Fab0016 LC L3
QQSFWVPFT

SEQ ID NO: 3886 - protein, 123 aa, synthetic construct
  REGION 1..123: note = Fab0016 HC
EVQLVESGGGLVQPGGSLRLSCAASGFNVYSSSIHWVRQAPGKGLEWVASIYSSSGYTSYADSVKGRFTISADTSKNTAYLQMNSLRAEDTAVYYCARWYPYYDWSGSALDYWGQGTLVTVSS

SEQ ID NO: 3887 - protein, 5 aa, synthetic construct
  REGION 1..5: note = Fab0016 HC H1
SSSIH

SEQ ID NO: 3888 - protein, 17 aa, synthetic construct
  REGION 1..17: note = Fab0016 HC H2
SIYSSSGYTSYADSVKG

SEQ ID NO: 3889 - protein, 14 aa, synthetic construct
  REGION 1..14: note = Fab0016 HC H3
WYPYYDWSGSALDY

SEQ ID NO: 3890 - protein, 107 aa, synthetic construct; identical to SEQ ID NO: 3802
  REGION 1..107: note = Fab0017 LC

SEQ ID NO: 3891 - protein, 11 aa, synthetic construct
  REGION 1..11: note = Fab0017 LC L1
RASQSVSSAVA

SEQ ID NO: 3892 - protein, 7 aa, synthetic construct
  REGION 1..7: note = Fab0017 LC L2
SASSLYS

SEQ ID NO: 3893 - protein, 9 aa, synthetic construct
  REGION 1..9: note = Fab0017 LC L3
QQSFWVPFT

SEQ ID NO: 3894 - protein, 123 aa, synthetic construct
  REGION 1..123: note = Fab0017 HC
EVQLVESGGGLVQPGGSLRLSCAASGFNVYSSSIHWVRQAPGKGLEWVASIYSSSGYTYYADSVKGRFTISADTSKNTAYLQMNSLRAEDTAVYYCARWYPYYDWYGSALDYWGQGTLVTVSS

SEQ ID NO: 3895 - protein, 5 aa, synthetic construct
  REGION 1..5: note = Fab0017 HC H1
SSSIH

SEQ ID NO: 3896 - protein, 17 aa, synthetic construct
  REGION 1..17: note = Fab0017 HC H2
SIYSSSGYTYYADSVKG

SEQ ID NO: 3897 - protein, 14 aa, synthetic construct
  REGION 1..14: note = Fab0017 HC H3
WYPYYDWYGSALDY

SEQ ID NO: 3898 - protein, 108 aa, synthetic construct
  REGION 1..108: note = Fab0018 LC
DIQMTQSPSSLSASVGDRVTITCRASQSVSSAVAWYQQKPGKAPKLLIYSASSLYSGVPSRFSGSRSGTDFTLTISSLQPEDFATYYCQQSYESSLITFGQGTKVEIK

SEQ ID NO: 3899 - protein, 11 aa, synthetic construct
  REGION 1..11: note = Fab0018 LC L1
RASQSVSSAVA

SEQ ID NO: 3900 - protein, 7 aa, synthetic construct
  REGION 1..7: note = Fab0018 HC H2
SASSLYS

SEQ ID NO: 3901 - protein, 10 aa, synthetic construct
  REGION 1..10: note = Fab0018 LC L3
QQSYESSLIT

SEQ ID NO: 3902 - protein, 123 aa, synthetic construct
  REGION 1..123: note = Fab0018 HC
EVQLVESGGGLVQPGGSLRLSCAASGFNISYSSIHWVRQAPGKGLEWVASIYPSSGYTSYADSVKGRFTISADTSKNTAYLQMNSLRAEDTAVYYCARYFWEMWEYDGALDYWGQGTLVTVSS

SEQ ID NO: 3903 - protein, 5 aa, synthetic construct
  REGION 1..5: note = Fab0018 HC H1
YSSIH

SEQ ID NO: 3904 - protein, 17 aa, synthetic construct
  REGION 1..17: note = Fab0018 HC H2
SIYPSSGYTSYADSVKG

SEQ ID NO: 3905 - protein, 14 aa, synthetic construct
  REGION 1..14: note = Fab0018 HC H3
YFWEMWEYDGALDY

SEQ ID NO: 3906 - protein, 107 aa, synthetic construct
  REGION 1..107: note = Fab0019 LC
DIQMTQSPSSLSASVGDRVTITCRASQSVSSAVAWYQQKPGKAPKLLIYSASSLYSGVPSRFSGSRSGTDFTLTISSLQPEDFATYYCQQSFWVPVTFGQGTKVEIK

SEQ ID NO: 3907 - protein, 11 aa, synthetic construct
  REGION 1..11: note = Fab0019 LC L1
RASQSVSSAVA

SEQ ID NO: 3908 - protein, 7 aa, synthetic construct
  REGION 1..7: note = Fab0019 LC L2
SASSLYS

SEQ ID NO: 3909 - protein, 9 aa, synthetic construct
  REGION 1..9: note = Fab0019 LC L3
QQSFWVPVT

SEQ ID NO: 3910 - protein, 123 aa, synthetic construct
  REGION 1..123: note = Fab0019 HC
EVQLVESGGGLVQPGGSLRLSCAASGFNFYSSSIHWVRQAPGKGLEWVASIYSYYGYTYYADSVKGRFTISADTSKNTAYLQMNSLRAEDTAVYYCARGFPYPDWSGSALDYWGQGTLVTVSS

SEQ ID NO: 3911 - protein, 5 aa, synthetic construct
  REGION 1..5: note = Fab0019 HC H1
SSSIH

SEQ ID NO: 3912 - protein, 17 aa, synthetic construct
  REGION 1..17: note = Fab0019 HC H2
SIYSYYGYTYYADSVKG

SEQ ID NO: 3913 - protein, 14 aa, synthetic construct
  REGION 1..14: note = Fab0019 HC H3
GFPYPDWSGSALDY

SEQ ID NO: 3914 - protein, 107 aa, synthetic construct; identical to SEQ ID NO: 3810
  REGION 1..107: note = Fab0020 LC

SEQ ID NO: 3915 - protein, 11 aa, synthetic construct
  REGION 1..11: note = Fab0020 LC L1
RASQSVSSAVA

SEQ ID NO: 3916 - protein, 7 aa, synthetic construct
  REGION 1..7: note = Fab0020 LC L2
SASSLYS

SEQ ID NO: 3917 - protein, 9 aa, synthetic construct
  REGION 1..9: note = Fab0020 LC L3
QQSSSSLIT

SEQ ID NO: 3918 - protein, 129 aa, synthetic construct
  REGION 1..129: note = Fab0020 HC
EVQLVESGGGLVQPGGSLRLSCAASGFNFSSSSIHWVRQAPGKGLEWVAYISSYYGYTSYADSVKGRFTISADTSKNTAYLQMNSLRAEDTAVYYCARGWYYSDIWYWHYSGQSAMDYWGQGTLVTVSS

SEQ ID NO: 3919 - protein, 5 aa, synthetic construct
  REGION 1..5: note = Fab0020 HC H1
SSSIH

SEQ ID NO: 3920 - protein, 17 aa, synthetic construct
  REGION 1..17: note = Fab0020 HC H2
YISSYYGYTSYADSVKG

SEQ ID NO: 3921 - protein, 20 aa, synthetic construct
  REGION 1..20: note = Fab0020 HC H3
GWYYSDIWYWHYSGQSAMDY

SEQ ID NO: 3922 - protein, 107 aa, synthetic construct
  REGION 1..107: note = Fab0021 LC
DIQMTQSPSSLSASVGDRVTITCRASQSVSSAVAWYQQKPGKAPKLLIYSASSLYSGVPSRFSGSRSGTDFTLTISSLQPEDFATYYCQQSFWFPFTFGQGTKVEIK

SEQ ID NO: 3923 - protein, 11 aa, synthetic construct
  REGION 1..11: note = Fab0021 LC L1
RASQSVSSAVA

SEQ ID NO: 3924 - protein, 7 aa, synthetic construct
  REGION 1..7: note = Fab0021 LC L2
SASSLYS

SEQ ID NO: 3925 - protein, 9 aa, synthetic construct
  REGION 1..9: note = Fab0021 LC L3
QQSFWFPFT

SEQ ID NO: 3926 - protein, 123 aa, synthetic construct
  REGION 1..123: note = Fab0021 HC
EVQLVESGGGLVQPGGSLRLSCAASGFNVYSSSIHWVRQAPGKGLEWVASIYSSSGYTYYADSVKGRFTISADTSKNTAYLQMNSLRAEDTAVYYCARGYPYSDWSGSALDYWGQGTLVTVSS

SEQ ID NO: 3927 - protein, 5 aa, synthetic construct
  REGION 1..5: note = Fab0021 HC H1
SSSIH

SEQ ID NO: 3928 - protein, 17 aa, synthetic construct
  REGION 1..17: note = Fab0021 HC H2
SIYSSSGYTYYADSVKG

SEQ ID NO: 3929 - protein, 14 aa, synthetic construct
  REGION 1..14: note = Fab0021 HC H3
GYPYSDWSGSALDY

SEQ ID NO: 3930 - protein, 107 aa, synthetic construct; identical to SEQ ID NO: 3810
  REGION 1..107: note = Fab0022 LC

SEQ ID NO: 3931 - protein, 11 aa, synthetic construct
  REGION 1..11: note = Fab0022 LC L1
RASQSVSSAVA

SEQ ID NO: 3932 - protein, 7 aa, synthetic construct
  REGION 1..7: note = Fab0022 LC L2
SASSLYS

SEQ ID NO: 3933 - protein, 9 aa, synthetic construct
  REGION 1..9: note = Fab0022 LC L3
QQSSSSLIT

SEQ ID NO: 3934 - protein, 124 aa, synthetic construct
  REGION 1..124: note = Fab0022 HC
EVQLVESGGGLVQPGGSLRLSCAASGFNVSSSYIHWVRQAPGKGLEWVASIYSYSSYTSYADSVKGRFTISADTSKNTAYLQMNSLRAEDTAVYYCARDGEYWSYYYWEAFDYWGQGTLVTVSS

SEQ ID NO: 3935 - protein, 5 aa, synthetic construct
  REGION 1..5: note = Fab0022 HC H1
SSYIH

SEQ ID NO: 3936 - protein, 17 aa, synthetic construct
  REGION 1..17: note = Fab0022 HC H2
SIYSYSSYTSYADSVKG

SEQ ID NO: 3937 - protein, 15 aa, synthetic construct
  REGION 1..15: note = Fab0022 HC H3
DGEYWSYYYWEAFDY

What is claimed is:

1. (canceled)

2. An EpCAM binding antibody or fragment thereof that comprises:
(a) a variable heavy chain (vh) that comprises:
(i) a vh complementary determining region 1 (vhCDR1) having an amino acid sequence that comprises: SEQ ID NO: 2545, SEQ ID NO: 2745, SEQ ID NO: 2801, SEQ ID NO: 2809, SEQ ID NO: 2817, SEQ ID NO: 2825, SEQ ID NO: 2833, SEQ ID NO: 2841, SEQ ID NO: 2865, or any of these amino acid sequences having 1 to 3 mutations and that is capable of binding EpCAM;
(ii) a vh complementary determining region 2 (vhCDR2) having an amino acid sequence that comprises: SEQ ID NO: 2746, SEQ ID NO: 2810, SEQ ID NO: 2554, SEQ ID NO: 2546, SEQ ID NO: 2898, SEQ ID NO: 2890, or any of these amino acid sequences having 1 to 3 mutations and that is capable of binding EpCAM;
(iii) a vh complementary determining region 3 (vhCDR3) having an amino acid sequence that comprises: SEQ ID NO: 2547, SEQ ID NO: 2747, SEQ ID NO: 2851, SEQ ID NO: 2859, SEQ ID NO: 2907, or any of these amino acid sequences having 1 to 3 mutations and that is capable of binding EpCAM; and
(b) a variable light chain (vl) that comprises:
(i) a vl complementary determining region 1 (vlCDR1) having an amino acid sequence that comprises SEQ ID NO: 2548, SEQ ID NO: 2748 or either of these amino acid sequences having 1 to 3 mutations and that is capable of binding EpCAM;
(ii) a vl complementary determining region 2 (vlCDR2) having an amino acid sequence that comprises SEQ ID NO: 2549, SEQ ID NO: 2749 or either of these amino acid sequences having 1 to 3 mutations and that is capable of binding EpCAM; and
(iii) a vl complementary determining region 3 (vlCDR3) having an amino acid sequence that comprises: SEQ ID NO: 2550, SEQ ID NO: 2750, SEQ ID NO: 2918, SEQ ID NO: 2926, SEQ ID NO: 2934, SEQ ID NO: 2942, or any of these amino acid sequences having 1 to 3 mutations and that is capable of binding EpCAM.

3. The EpCAM binding antibody or fragment thereof of claim 2, wherein:
(a) the vhCDR1 has an amino acid sequence that comprises SEQ ID NO: 2745 or SEQ ID NO: 2745 having 1 to 3 mutations and that is capable of binding EpCAM;
(b) the vhCDR2 has an amino acid sequence that comprises SEQ ID NO: 2746 or SEQ ID NO: 2746 having 1 to 3 mutations and that is capable of binding EpCAM;
(c) the vhCDR3 has an amino acid sequence that comprises SEQ ID NO: 2747 or SEQ ID NO: 2747 having 1 to 3 mutations and that is capable of binding EpCAM;
(d) the vlCDR1 has an amino acid sequence that comprises SEQ ID NO: 2748 or SEQ ID NO: 2748 having 1 to 3 mutations and that is capable of binding EpCAM,
(e) the vlCDR2 has an amino acid sequence that comprises SEQ ID NO: 2749 or SEQ ID NO: 2749 having 1 to 3 mutations and that is capable of binding EpCAM, and
(f) the vlCDR3 has an amino acid sequence that comprises SEQ ID NO: 2750 or SEQ ID NO: 2750 having 1 to 3 mutations and that is capable of binding EpCAM.

4. The EpCAM binding antibody or fragment thereof of claim 2, wherein the antibody or the fragment thereof is humanized.

5. The EpCAM binding antibody or fragment thereof of claim 2, wherein the fragment of the EpCam binding antibody is a scFv.

6. The EpCAM binding antibody or fragment thereof of claim 2, wherein the antibody or fragment thereof further comprises a tumor-associated antigen binding domain, wherein the tumor-associated antigen binding domain binds to HER2 or CD20.

7. The EpCAM binding antibody or fragment thereof of claim 6, wherein the antibody or fragment thereof comprises an Fc domain that comprises one or more knob variants or one or more hole variants.

8. The EpCAM binding antibody or fragment thereof of claim 2, wherein the antibody or fragment thereof exhibits antibody dependent cell-mediated cytotoxicity.

9. An EpCAM binding domain or fragment thereof that comprises:
(a) a variable heavy chain (vh) that comprises:
(i) a vh complementary determining region 1 (vhCDR1) having an amino acid sequence that comprises SEQ ID NO: 2761 or SEQ ID NO: 2761 having 1 to 3 mutations and that is capable of binding EpCAM;
(ii) a vh complementary determining region 2 (vhCDR2) having an amino acid sequence that comprises SEQ ID NO: 2762 and that is capable of binding EpCAM;
(iii) a vh complementary determining region 3 (vhCDR3) having an amino acid sequence that comprises SEQ ID NO: 2763 or SEQ ID NO: 2763 having 1 to 3 mutations and that is capable of binding EpCAM;
(b) a variable light chain (vl) that comprises:
(i) a vl complementary determining region 1 (vlCDR1) having an amino acid sequence that comprises SEQ ID NO: 2764 or SEQ ID NO: 2764 having 1 to 3 mutations and that is capable of binding EpCAM,
(ii) a vl complementary determining region 2 (vlCDR2) having an amino acid sequence that comprises SEQ ID NO: 2765 or SEQ ID NO: 2765 having 1 to 3 mutations and that is capable of binding EpCAM, and
(iii) a vl complementary determining region 3 (vlCDR3) having an amino acid sequence that comprises SEQ ID NO: 2766 or SEQ ID NO: 2766 having 1 to 3 mutations and that is capable of binding EpCAM.

10. A method of treating cancer in a subject, the method comprising administering to the subject the EpCAM binding domain or fragment thereof of claim 9.

11. The method of claim 10, wherein the EpCAM binding domain or fragment thereof is humanized.

12. The method of claim 10, wherein the fragment of the EpCam binding domain is a scFv.

13. The method of claim 10, wherein the EpCAM binding domain or fragment thereof further comprises a tumor-associated antigen binding domain.

14. The method of claim 13, wherein the tumor-associated antigen binding domain binds to HER2 or CD20.

15. The method of claim 10, wherein the EpCAM binding domain or fragment thereof exhibits antibody dependent cell-mediated cytotoxicity.

16. The method of claim 10, wherein the administering is oral, intravenous, subcutaneous, or intratumorally.

17. A method of treating cancer in a subject, the method comprising administering to the subject an EpCAM binding antibody or fragment thereof that comprises:
(a) a variable heavy chain (vh) that comprises:
(i) a vh complementary determining region 1 (vhCDR1) having an amino acid sequence that comprises: SEQ ID NO: 2545, SEQ ID NO: 2745, SEQ ID NO: 2801, SEQ ID NO: 2809, SEQ ID NO: 2817, SEQ ID NO: 2825, SEQ ID NO: 2833, SEQ ID NO: 2841, SEQ ID NO: 2865, or any of these amino acid sequences having 1 to 3 mutations and that is capable of binding EpCAM;
(ii) a vh complementary determining region 2 (vhCDR2) having an amino acid sequence that comprises: SEQ ID NO: 2746, SEQ ID NO: 2810, SEQ ID NO: 2554, SEQ ID NO: 2546, SEQ ID NO: 2898, SEQ ID NO: 2890, or any of these amino acid sequences having 1 to 3 mutations and that is capable of binding EpCAM;
(iii) a vh complementary determining region 3 (vhCDR3) having an amino acid sequence that comprises: SEQ ID NO: 2547, SEQ ID NO: 2747, SEQ ID NO: 2851, SEQ ID NO: 2859, SEQ ID NO: 2907, or any of these amino acid sequences having 1 to 3 mutations and that is capable of binding EpCAM; and
(b) a variable light chain (vl) that comprises:
(i) a vl complementary determining region 1 (vlCDR1) having an amino acid sequence that comprises SEQ ID NO: 2548, SEQ ID NO: 2748 or either of these amino acid sequences having 1 to 3 mutations and that is capable of binding EpCAM;
(ii) a vl complementary determining region 2 (vlCDR2) having an amino acid sequence that comprises SEQ ID NO: 2549, SEQ ID NO: 2749 or either of these amino acid sequences having 1 to 3 mutations and that is capable of binding EpCAM; and
(iii) a vl complementary determining region 3 (vlCDR3) having an amino acid sequence that comprises: SEQ ID NO: 2550, SEQ ID NO: 2750, SEQ ID NO: 2918, SEQ ID NO: 2926, SEQ ID NO: 2934, SEQ ID NO: 2942, or any of these amino acid sequences having 1 to 3 mutations and that is capable of binding EpCAM.

18. The method of claim 17, wherein the EpCAM binding antibody or the fragment thereof is humanized.

19. The method of claim 17, wherein the fragment of the EpCam binding antibody is a scFv.

20. The method of claim 17, wherein the EpCAM binding antibody or fragment thereof further comprises a tumor-associated antigen binding domain.

21. The method of claim 20, wherein the tumor-associated antigen binding domain binds to HER2 or CD20.

22. The method of claim 17, wherein the EpCAM binding antibody or fragment thereof exhibits antibody dependent cell-mediated cytotoxicity.

23. The method of claim 17, wherein:
(a) the vhCDR1 has an amino acid sequence that comprises SEQ ID NO: 2745 or SEQ ID NO: 2745 having 1 to 3 mutations and that is capable of binding EpCAM;
(b) the vhCDR2 has an amino acid sequence that comprises SEQ ID NO: 2746 or SEQ ID NO: 2746 having 1 to 3 mutations and that is capable of binding EpCAM;
(c) the vhCDR3 has an amino acid sequence that comprises SEQ ID NO: 2747 or SEQ ID NO: 2747 having 1 to 3 mutations and that is capable of binding EpCAM;
(d) the vlCDR1 has an amino acid sequence that comprises SEQ ID NO: 2748 or SEQ ID NO: 2748 having 1 to 3 mutations and that is capable of binding EpCAM,
(e) the vlCDR2 has an amino acid sequence that comprises SEQ ID NO: 2749 or SEQ ID NO: 2749 having 1 to 3 mutations and that is capable of binding EpCAM, and
(f) the vlCDR3 has an amino acid sequence that comprises SEQ ID NO: 2750 or SEQ ID NO: 2750 having 1 to 3 mutations and that is capable of binding EpCAM.

24. The method of claim 17, wherein the administering is oral, intravenous, subcutaneous, or intratumorally.
